(19) United States
(12) Patent Application Publication
(10) Pub. No.: US 2016/0324934 A1
(43) Pub. Date: Nov. 10, 2016

(54) METHODS AND PRODUCTS FOR NUCLEIC ACID PRODUCTION AND DELIVERY

(71) Applicant: Factor Bioscience Inc., Cambridge, MA (US)

(72) Inventors: Matthew Angel, Cambridge, MA (US); Christopher Rohde, Cambridge, MA (US)

(21) Appl. No.: 14/761,461

(22) PCT Filed: Jan. 30, 2015
(86) PCT No.: PCT/US15/13949

§ 371 Date: Jul. 16, 2015

Related U.S. Application Data
(60) Provisional application No. 62/069,667, filed on Oct. 28, 2014.
(60) Provisional application No. 62/038,608, filed on Aug. 18, 2014.
(60) Provisional application No. 61/934,397, filed on Jan. 31, 2014.

(51) Int. Cl. A61K 38/39; A61B 18/18; A61M 35/00; A61K 48/00; A61K 9/00

(52) U.S. Cl. CPC A61K 38/39; A61K 48/00; A61K 9/0019; A61M 35/00; A61B 18/18

(57) ABSTRACT

The present invention relates in part to nucleic acids, including nucleic acids encoding proteins, therapeutics and cosmetics comprising nucleic acids, methods for delivering nucleic acids to cells, tissues, organs, and patients, methods for inducing cells to express proteins using nucleic acids, methods, kits and devices for transfecting, gene editing, and reprogramming cells, and cells, organisms, therapeutics, and cosmetics produced using these methods, kits, and devices. Methods and products for altering the DNA sequence of a cell are described, as are methods and products for inducing cells to express proteins using synthetic RNA molecules, including cells present in vivo. Therapeutics comprising nucleic acids encoding gene-editing proteins are also described.

### PRIORITY

[0001] The present application claims priority to U.S. Provisional Application No. 61/934,397, filed on Jan. 31, 2014, U.S. Provisional Application No. 62/038,608, filed on Aug. 18, 2014, and U.S. Provisional Application No. 62/069,667, filed on Oct. 28, 2014, the entire contents of which are hereby incorporated by reference in their entireties.

[0002] The present application is related to U.S. application Ser. No. 13/465,490, filed on May 7, 2012, International Application No. PCT/US2012/067966, filed on Dec. 5, 2012, U.S. application Ser. No. 13/931,251, filed on Jun. 28, 2013, and International Application No. PCT/US2013/068118, filed on Nov. 1, 2013, the entire contents of which are hereby incorporated by reference in their entireties.

### FIELD OF THE INVENTION

[0003] The present invention relates, in part, to methods, compositions, and products for producing and delivering nucleic acids to cells, tissues, organs, and patients, methods for expressing proteins in cells, tissues, organs, and patients, and cells, therapeutics, and cosmetics produced using these methods, compositions, and products.

### DESCRIPTION OF THE TEXT FILE SUBMITTED ELECTRONICALLY

[0004] The contents of the text file submitted electronically herewith are incorporated herein by reference in their entirety: A computer readable format copy of the Sequence Listing (filename: FAB-008PC SequenceListing.txt; date recorded: Jan. 30, 2015; file size: 929 KB).

### BACKGROUND

### Synthetic RNA and Nucleic-Acid Therapeutics

[0005] Ribonucleic acid (RNA) is ubiquitous in both prokaryotic and eukaryotic cells, where it encodes genetic information in the form of messenger RNA, binds and transports amino acids in the form of transfer RNA, assembles amino acids into proteins in the form of ribosomal RNA, and performs numerous other functions including gene expression regulation in the forms of microRNA and long non-coding RNA. RNA can be produced synthetically by methods including direct chemical synthesis and in vitro transcription, and can be administered to patients for therapeutic use. However, previously described synthetic RNA molecules are unstable and trigger a potent innate-immune response in human cells. In addition, methods for efficient non-viral delivery of nucleic acids to patients, organs, tissues, and cells in vivo have not been previously described. The many drawbacks of existing synthetic RNA technologies and methods for delivery of nucleic acids make them undesirable for therapeutic or cosmetic use.

### Cell Reprogramming and Cell-Based Therapies

[0006] Cells can be reprogrammed by exposing them to specific extracellular cues and/or by ectopic expression of specific proteins, microRNAs, etc. While several reprogramming methods have been previously described, most that rely on ectopic expression require the introduction of exogenous DNA, which can carry mutation risks. DNA-free reprogramming methods based on direct delivery of reprogramming proteins have been reported. However, these methods are too inefficient and unreliable for commercial use. In addition, RNA-based reprogramming methods have been described (See, e.g., Angel. MIT Thesis. 2008. 1-56; Angel et al. PLoS ONE. 2010. 5, 107; Warren et al. Cell Stem Cell. 2010. 7, 618-630; Angel. MIT Thesis. 2011. 1-89; and Lee et al. Cell. 2012. 151, 547-558; the contents of all of which are hereby incorporated by reference). However, existing RNA-based reprogramming methods are slow, unreliable, and inefficient when performed on adult cells, require many transfections (resulting in significant expense and opportunity for error), can reprogram only a limited number of cell types, can reprogram cells to only a limited number of cell types, require the use of immunosuppressants, and require the use of multiple human-derived components, including blood-derived HSA and human fibroblast feeders. The many drawbacks of previously disclosed RNA-based reprogramming methods make them undesirable for in vivo use.

### Gene Editing

[0007] Several naturally occurring proteins contain DNA-binding domains that can recognize specific DNA sequences, for example, zinc fingers (ZFs) and transcription activator-like effectors (TALEs). Fusion proteins containing one or more of these DNA-binding domains and the cleavage domain of Fokl endonuclease can be used to create a double-strand break in a desired region of DNA in a cell (See, e.g., US Patent Appl. Pub. No. US 2012/0064620, US Patent Appl. Pub. No. US 2011/0239315, U.S. Pat. No. 8,470,973, US Patent Appl. Pub. No. US 2013/0217119, U.S. Pat. No. 8,420,782, US Patent Appl. Pub. No. US 2011/0301073, US Patent Appl. Pub. No. US 2011/0145940, U.S. Pat. No. 8,450,471, U.S. Pat. No. 8,440,431, U.S. Pat. No. 8,440,432, and US Patent Appl. Pub. No. 2013/0122581, the contents of all of which are hereby incorporated by reference). However, current methods for gene editing cells are inefficient and carry a risk of uncontrolled mutagenesis, making them undesirable for both research and therapeutic use. Methods for DNA-free gene editing of somatic cells have not been previously explored, nor have methods for simultaneous or sequential gene editing and reprogramming of somatic cells. In addition, methods for directly gene editing cells in patients (i.e., in vivo) have not been previously explored, and the development of such methods has been limited by a lack of acceptable targets, inefficient delivery, inefficient expression of the gene-editing protein/proteins, inefficient gene editing by the expressed gene-editing protein/proteins, due in part to poor binding of DNA-binding domains, excessive off-target effects, due in part to non-directed dimerization of the Fokl cleavage domain and poor specificity of DNA-binding domains, and other factors. Finally, the use of gene editing in anti-bacterial, anti-viral, and anti-cancer treatments has not been previously explored.

[0008] Accordingly, there remains a need for improved methods and compositions for the production and delivery of nucleic acids to cells, tissues, organs, and patients.

### SUMMARY OF THE INVENTION

[0009] The present invention provides, in part, compositions, methods, articles, and devices for delivering nucleic acids to cells, tissues, organs, and patients, methods for inducing cells to express proteins, methods, articles, and devices for producing these compositions, methods, articles, and devices, and compositions and articles, including cells, organisms, cosmetics and therapeutics, produced using these compositions, methods, articles, and devices. Unlike previously reported methods, certain embodiments of the present invention do not involve exposing cells to exogenous DNA or to allogeneic or animal-derived materials, making products produced according to the methods of the present invention useful for therapeutic and cosmetic applications.

[0010] In some aspects, there is provided a method for expressing a protein in a cell population of a patient, comprising introducing an RNA into the cell population, the RNA comprising one or more non-canonical nucleotides that do not induce significant cellular immune response and do not substantially reduce protein expression. In some embodiments, at least 50%, or at least 75%, or at least 90% of the non-canonical nucleotides are selected from one or more of 5-hydroxycytidine, 5-hydroxymethylcytidine, 5-carboxycytidine, 5-formylcytidine, 5-hydroxyuridine, 5-hydroxymethyluridine, 5-carboxyuridine, and 5-formyluridine, or in some embodiments selected from one or more of 5-hydroxymethylcytidine, 5-carboxycytidine, and 5-formylcytidine. Further embodiments relate to additional elements of the RNA, e.g. a 5′ cap structure, a 3′ poly(A) tail, and 5′-UTR and/or 3′-UTR, which optionally comprises one or more of a Kozak consensus sequence, a sequence that increases RNA stability in vivo (such as, by way of illustration, an alpha-globin or beta-globin 5′-UTR).

[0011] In some aspects, nucleic acid delivery patches are provided. In one aspect, devices for delivering nucleic acids using electric fields are provided. Other aspects pertain to methods and compositions for delivery of nucleic acids to the skin. Still further aspects pertain to methods and compositions for expression of proteins in the skin.

[0012] In one aspect, the invention provides methods and compositions for treating diseases and conditions in humans, including, but not limited to, prophylactic treatments, treatments for rare diseases, including, but not limited to, dermatologic rare diseases, and treatments for use in medical dermatology and aesthetic medicine. In another aspect, the invention provides cosmetics comprising nucleic acids. Still further aspects relate to methods and compositions for altering pigmentation, for example, for the treatment of pigmentation disorders. Still further aspects relate to methods and compositions for enhancing healing, including, but not limited to, healing in response to a wound or surgery. Other aspects relate to nucleic acids comprising one or more non-canonical nucleotides. In one aspect, the invention provides nucleic acids comprising, for example, one or more of 5-hydroxycytidine, 5-hydroxymethylcytidine, 5-carboxycytidine, 5-formylcytidine, 5-hydroxyuridine, 5-hydroxymethyluridine, 5-carboxyuridine, and 5-formyluridine, or in some embodiments selected from one or more of 5-hydroxymethylcytidine, 5-carboxycytidine, and/or 5-formylcytidine.

[0013] The compositions of the present invention may alter, modify and/or change the appearance of a member of the integumenary system of a subject such as, but not limited, to skin, hair and nails. Such alteration, modification and/or change may be in the context of treatment methods and/or therapeutic uses as described herein including, by way of non-limiting example, dermatological treatments and cosmetics procedures.

[0014] In some aspects, synthetic RNA molecules with low toxicity and high translation efficiency are provided. In one aspect, a cell-culture medium for high-efficiency in vivo transfection, reprogramming, and gene editing of cells is provided. Other aspects pertain to methods for producing synthetic RNA molecules encoding reprogramming proteins. Still further aspects pertain to methods for producing synthetic RNA molecules encoding gene-editing proteins.

[0015] In one aspect, the invention provides high-efficiency gene-editing proteins comprising engineered nuclease cleavage domains. In another aspect, the invention provides high-fidelity gene-editing proteins comprising engineered nuclease cleavage domains. Other aspects relate to high-efficiency gene-editing proteins comprising engineered DNA-binding domains. Still further aspects pertain to high-fidelity gene-editing proteins comprising engineered DNA-binding domains. Still further aspects relate to gene-editing proteins comprising engineered repeat sequences. Some aspects relate to methods for altering the DNA sequence of a cell by transfecting the cell with or inducing the cell to express a gene-editing protein. Other aspects relate to methods for altering the DNA sequence of a cell that is present in an in vitro culture. Still further aspects relate to methods for altering the DNA sequence of a cell that is present in vivo.

[0016] In some aspects, the invention provides methods for treating cancer comprising administering to a patient a therapeutically effective amount of a gene-editing protein or a nucleic-acid encoding a gene-editing protein. In one aspect, the gene-editing protein is capable of altering the DNA sequence of a cancer associated gene. In another aspect, the cancer-associated gene is the BIRC5 gene. Still other aspects relate to therapeutics comprising nucleic acids and/or cells and methods of using therapeutics comprising nucleic acids and/or cells for the treatment of, for example, type 1 diabetes, heart disease, including ischemic and dilated cardiomyopathy, macular degeneration, Parkinson's disease, cystic fibrosis, sickle-cell anemia, thalassemia, Fanconi anemia, severe combined immunodeficiency, hereditary sensory neuropathy, xeroderma pigmentosum, Huntington's disease, muscular dystrophy, amyotrophic lateral sclerosis, Alzheimer's disease, cancer, and infectious diseases including hepatitis and HIV/AIDS. In some aspects, the nucleic acids comprise synthetic RNA. In other aspects, the nucleic acids are delivered to cells using a virus. In some aspects, the virus is a replication-competent virus. In other aspects, the virus is a replication-incompetent virus.

[0017] The details of the invention are set forth in the accompanying description below. Although methods and materials similar or equivalent to those described herein can be used in the practice or testing of the present invention, illustrative methods and materials are now described. Other features, objects, and advantages of the invention will be apparent from the description and from the claims. In the specification and the appended claims, the singular forms also include the plural unless the context clearly dictates otherwise. Unless defined otherwise, all technical and scientific terms used herein have the same meaning as commonly understood by one of ordinary skill in the art to which this invention belongs.

### DETAILED DESCRIPTION OF THE FIGURES

[0018] FIG. 1 depicts RNA encoding human elastin protein and containing adenosine, 50% guanosine, 50% 7-deazaguanosine, 60% uridine, 40% 5-methyluridine, and 5-methylcytidine, resolved on a denaturing formaldehyde-agarose gel.

[0019] FIG. 2 depicts primary adult human dermal fibroblasts transfected with the RNA of FIG. 1.

[0020] FIG. 3 depicts the result of an immunocytochemical analysis of the primary adult human dermal fibroblasts of FIG. 2 using an antibody targeting human elastin protein.

[0021] FIG. 4 depicts primary human dermal fibroblasts transfected with synthetic RNA comprising cytidine, 5-methylcytidine (“5mC”), 5-hydroxymethylcytidine (“5hmC”), 5-carboxycytidine (“5cC”) or 5-formylcytidine (“5fC”) and encoding Oct4 protein. Cells were fixed and stained for Oct4 protein 24 hours after transfection.

[0022] FIG. 5 depicts primary human dermal fibroblasts transfected with synthetic RNA comprising 5-hydroxymethylcytidine and encoding green fluorescent protein (“GFP”). Cells were imaged 24 hours after transfection.

[0023] FIG. 6 depicts a region of the ventral forearm of a healthy, 33 year-old, male human subject treated with synthetic RNA comprising 5-hydroxymethylcytidine (“5hmC”) and encoding GFP. Arrows indicate fluorescent cells.

[0024] FIG. 7 depicts a region of the ventral forearm of a healthy, 33 year-old, male patient treated with synthetic RNA comprising 5-hydroxymethylcytidine (“5hmC”) and encoding GFP. The top panel shows an untreated area on the same forearm, while the bottom panels show two fields within the treatment area. Fluorescent cells (indicated with arrows) are clearly visible in the bottom panels.

[0025] FIG. 8 depicts primary human dermal fibroblasts transfected with synthetic RNA comprising 5-methyluridine and 5-hydroxymethylcytidine and encoding the indicated protein. Cells were fixed and stained using antibodies targeting the indicated protein 48 hours after transfection.

[0026] FIG. 9 depicts primary human dermal fibroblasts transfected with synthetic RNA comprising 5-methyluridine and 5-hydroxymethylcytidine and encoding human tyrosinase. Cells were fixed and stained using an antibody targeting human tyrosinase 24 hours after transfection.

[0027] FIG. 10 depicts primary human epidermal melanocytes.

[0028] FIG. 11 depicts primary human dermal fibroblasts transfected with synthetic RNA comprising 5-hydroxymethylcytidine and encoding the indicated proteins.

[0029] FIG. 12 depicts primary human dermal fibroblasts transfected daily with synthetic RNA comprising 5-hydroxymethylcytidine and encoding human tyrosinase. The number of transfections are shown above each sample. The cells were imaged 48 hours after the final transfection.

[0030] FIG. 13 depicts primary human dermal fibroblasts transfected daily with synthetic RNA comprising the indicated nucleotides and encoding human tyrosinase. The cells were imaged 48 hours after transfection.

[0031] FIG. 14 depicts IFNB1 expression and pigment production in primary human dermal fibroblasts transfected with synthetic RNA comprising the indicated nucleotides and encoding human tyrosinase. Values are normalized to the sample transfected with synthetic RNA comprising only canonical nucleotides (“A,G,U,C”). GAPDH was used as a loading control. Error bars indicate standard error (n=2).

[0032] FIG. 15 depicts expression of the indicated genes, measured as in FIG. 14.

[0033] FIG. 16 depicts a region of the ventral forearm of a healthy, 33 year-old, male human subject treated with synthetic RNA comprising 5-methyluridine and 5-hydroxymethylcytidine and encoding human tyrosinase (top panel), and an ephelis on the ventral forearm of the same subject (bottom panel). The same magnification was used for both images.

[0034] FIG. 17 depicts primary human dermal fibroblasts transfected with synthetic RNA comprising 5-hydroxymethylcytidine and encoding collagen I (A1) (“+COL1 RNA”). Cells were fixed and stained using an antibody targeting collagen I between 24 and 72 hours after transfection. Two representative fields are shown for each of: the transfected cells and un-transfected cells (“Neg.”). Arrows indicate extracellular deposits of collagen I.

[0035] FIG. 18 depicts primary human dermal fibroblasts transfected with synthetic RNA comprising 5-hydroxymethylcytidine and encoding collagen VII (A1) (“+COL7 RNA”). Cells were fixed and stained using an antibody targeting collagen I between 24 and 72 hours after transfection. A representative field is shown for each of: the transfected cells and un-transfected cells (“Neg.”).

### DETAILED DESCRIPTION OF THE INVENTION

[0036] Definitions

[0037] By “molecule” is meant a molecular entity (molecule, ion, complex, etc.).

[0038] By “RNA molecule” is meant a molecule that comprises RNA.

[0039] By “synthetic RNA molecule” is meant an RNA molecule that is produced outside of a cell or that is produced inside of a cell using bioengineering, by way of non-limiting example, an RNA molecule that is produced in an in vitro-transcription reaction, an RNA molecule that is produced by direct chemical synthesis or an RNA molecule that is produced in a genetically-engineered E. coli cell.

[0040] By “transfection” is meant contacting a cell with a molecule, wherein the molecule is internalized by the cell.

[0041] By “upon transfection” is meant during or after transfection.

[0042] By “transfection reagent” is meant a substance or mixture of substances that associates with a molecule and facilitates the delivery of the molecule to and/or internalization of the molecule by a cell, by way of non-limiting example, a cationic lipid, a charged polymer or a cell-penetrating peptide.

[0043] By “reagent-based transfection” is meant transfection using a transfection reagent.

[0044] By “cell-culture medium” is meant a medium that can be used for cell culture, by way of non-limiting example, Dulbecco's Modified Eagle's Medium (DMEM) or DMEM+10% fetal bovine serum (FBS), whether or not the medium is used in vitro or in vivo.

[0045] By “complexation medium” is meant a medium to which a transfection reagent and a molecule to be transfected are added and in which the transfection reagent associates with the molecule to be transfected.

[0046] By “transfection medium” is meant a medium that can be used for transfection, by way of non-limiting example, Dulbecco's Modified Eagle's Medium (DMEM), DMEM/F12, saline or water, whether or not the medium is used in vitro or in vivo.

[0047] By “recombinant protein” is meant a protein or peptide that is not produced in animals or humans. Non-limiting examples include human transferrin that is produced in bacteria, human fibronectin that is produced in an in vitro culture of mouse cells, and human serum albumin that is produced in a rice plant.

[0048] By “lipid carrier” is meant a substance that can increase the solubility of a lipid or lipid-soluble molecule in an aqueous solution, by way of non-limiting example, human serum albumin or methyl-beta-cyclodextrin.

[0049] By “Oct4 protein” is meant a protein that is encoded by the POU5F1 gene, or a natural or engineered variant, family-member, orthologue, fragment or fusion construct thereof, by way of non-limiting example, human Oct4 protein (SEQ ID NO: 8), mouse Oct4 protein, Oct1 protein, a protein encoded by POU5F1 pseudogene 2, a DNA-binding domain of Oct4 protein or an Oct4-GFP fusion protein. In some embodiments the Oct4 protein comprises an amino acid sequence that has at least 70% identity with SEQ ID NO: 8, or in other embodiments, at least 75%, 80%, 85%, 90%, or 95% identity with SEQ ID NO: 8. In some embodiments, the Oct4 protein comprises an amino acid sequence having from 1 to 20 amino acid insertions, deletions, or substitutions (collectively) with respect to SEQ ID NO: 8. Or in other embodiments, the Oct4 protein comprises an amino acid sequence having from 1 to 15 or from 1 to 10 amino acid insertions, deletions, or substitutions (collectively) with respect to SEQ ID NO: 8.

[0050] By “Sox2 protein” is meant a protein that is encoded by the SOX2 gene, or a natural or engineered variant, family-member, orthologue, fragment or fusion construct thereof, by way of non-limiting example, human Sox2 protein (SEQ ID NO: 9), mouse Sox2 protein, a DNA-binding domain of Sox2 protein or a Sox2-GFP fusion protein. In some embodiments the Sox2 protein comprises an amino acid sequence that has at least 70% identity with SEQ ID NO: 9, or in other embodiments, at least 75%, 80%, 85%, 90%, or 95% identity with SEQ ID NO: 9. In some embodiments, the Sox2 protein comprises an amino acid sequence having from 1 to 20 amino acid insertions, deletions, or substitutions (collectively) with respect to SEQ ID NO: 9. Or in other embodiments, the Sox2 protein comprises an amino acid sequence having from 1 to 15 or from 1 to 10 amino acid insertions, deletions, or substitutions (collectively) with respect to SEQ ID NO: 9.

[0051] By “Klf4 protein” is meant a protein that is encoded by the KLF4 gene, or a natural or engineered variant, family-member, orthologue, fragment or fusion construct thereof, by way of non-limiting example, human Klf4 protein (SEQ ID NO: 10), mouse Klf4 protein, a DNA-binding domain of Klf4 protein or a Klf4-GFP fusion protein. In some embodiments the Klf4 protein comprises an amino acid sequence that has at least 70% identity with SEQ ID NO: 10, or in other embodiments, at least 75%, 80%, 85%, 90%, or 95% identity with SEQ ID NO: 10. In some embodiments, the Klf4 protein comprises an amino acid sequence having from 1 to 20 amino acid insertions, deletions, or substitutions (collectively) with respect to SEQ ID NO: 10. Or in other embodiments, the Klf4 protein comprises an amino acid sequence having from 1 to 15 or from 1 to 10 amino acid insertions, deletions, or substitutions (collectively) with respect to SEQ ID NO: 10.

[0052] By “c-Myc protein” is meant a protein that is encoded by the MYC gene, or a natural or engineered variant, family-member, orthologue, fragment or fusion construct thereof, by way of non-limiting example, human c-Myc protein (SEQ ID NO: 11), mouse c-Myc protein, l-Myc protein, c-Myc (T58A) protein, a DNA-binding domain of c-Myc protein or a c-Myc-GFP fusion protein. In some embodiments the c-Myc protein comprises an amino acid sequence that has at least 70% identity with SEQ ID NO: 11, or in other embodiments, at least 75%, 80%, 85%, 90%, or 95% identity with SEQ ID NO: 11. In some embodiments, the c-Myc protein comprises an amino acid having from 1 to 20 amino acid insertions, deletions, or substitutions (collectively) with respect to SEQ ID NO: 11. Or in other embodiments, the c-Myc protein comprises an amino acid sequence having from 1 to 15 or from 1 to 10 amino acid insertions, deletions, or substitutions (collectively) with respect to SEQ ID NO: 11.

[0053] By “reprogramming” is meant causing a change in the phenotype of a cell, by way of non-limiting example, causing a 3-cell progenitor to differentiate into a mature 3-cell, causing a fibroblast to dedifferentiate into a pluripotent stem cell, causing a keratinocyte to transdifferentiate into a cardiac stem cell, causing the telomeres of a cell to lengthen or causing the axon of a neuron to grow.

[0054] By “reprogramming factor” is meant a molecule that, when a cell is contacted with the molecule and/or the cell expresses the molecule, can, either alone or in combination with other molecules, cause reprogramming, by way of non-limiting example, Oct4 protein.

[0055] By “feeder” is meant a cell that can be used to condition medium or to otherwise support the growth of other cells in culture.

[0056] By “conditioning” is meant contacting one or more feeders with a medium.

[0057] By “fatty acid” is meant a molecule that comprises an aliphatic chain of at least two carbon atoms, by way of non-limiting example, linoleic acid, α-linolenic acid, octanoic acid, a leukotriene, a prostaglandin, cholesterol, a glucocorticoid, a resolvin, a protectin, a thromboxane, a lipoxin, a maresin, a sphingolipid, tryptophan, N-acetyl tryptophan or a salt, methyl ester or derivative thereof.

[0058] By “short-chain fatty acid” is meant a fatty acid that comprises an aliphatic chain of between two and 30 carbon atoms.

[0059] By “albumin” is meant a protein that is highly soluble in water, by way of non-limiting example, human serum albumin.

[0060] By “associated molecule” is meant a molecule that is non-covalently bound to another molecule.

[0061] By “associated-molecule-component of albumin” is meant one or more molecules that are bound to an albumin polypeptide, by way of non-limiting example, lipids, hormones, cholesterol, calcium ions, etc. that are bound to an albumin polypeptide.

[0062] By “treated albumin” is meant albumin that is treated to reduce, remove, replace or otherwise inactivate the associated-molecule-component of the albumin, by way of non-limiting example, human serum albumin that is incubated at an elevated temperature, human serum albumin that is contacted with sodium octanoate or human serum albumin that is contacted with a porous material.

[0063] By “ion-exchange resin” is meant a material that, when contacted with a solution containing ions, can replace one or more of the ions with one or more different ions, by way of non-limiting example, a material that can replace one or more calcium ions with one or more sodium ions.

[0064] By “germ cell” is meant a sperm cell or an egg cell.

[0065] By “pluripotent stem cell” is meant a cell that can differentiate into cells of all three germ layers (endoderm, mesoderm, and ectoderm) in vivo.

[0066] By “somatic cell” is meant a cell that is not a pluripotent stem cell or a germ cell, by way of non-limiting example, a skin cell.

[0067] By “glucose-responsive insulin-producing cell” is meant a cell that, when exposed to a certain concentration of glucose, can produce and/or secrete an amount of insulin that is different from (either less than or more than) the amount of insulin that the cell produces and/or secretes when the cell is exposed to a different concentration of glucose, by way of non-limiting example, a β-cell.

[0068] By “hematopoietic cell” is meant a blood cell or a cell that can differentiate into a blood cell, by way of non-limiting example, a hematopoietic stem cell or a white blood cell.

[0069] By “cardiac cell” is meant a heart cell or a cell that can differentiate into a heart cell, by way of non-limiting example, a cardiac stem cell or a cardiomyocyte.

[0070] By “retinal cell” is meant a cell of the retina or a cell that can differentiate into a cell of the retina, by way of non-limiting example, a retinal pigmented epithelial cell.

[0071] By “skin cell” is meant a cell that is normally found in the skin, by way of non-limiting example, a fibroblast, a keratinocyte, a melanocyte, an adipocyte, a mesenchymal stem cell, an adipose stem cell or a blood cell.

[0072] By “Wnt signaling agonist” is meant a molecule that can perform one or more of the biological functions of one or more members of the Wnt family of proteins, by way of non-limiting example, Wnt1, Wnt2, Wnt3, Wnt3a or 2-amino-4-[3,4-(methylenedioxy)benzylamino]-6-(3-methoxyphenyl)pyrimidine.

[0073] By “IL-6 signaling agonist” is meant a molecule that can perform one or more of the biological functions of IL-6 protein, by way of non-limiting example, IL-6 protein or IL-6 receptor (also known as soluble IL-6 receptor, IL-6R, IL-6R alpha, etc.).

[0074] By “TGF-β signaling agonist” is meant a molecule that can perform one or more of the biological functions of one or more members of the TGF-β superfamily of proteins, by way of non-limiting example, TGF-β1, TGF-β3, Activin A, BMP-4 or Nodal.

[0075] By “immunosuppressant” is meant a substance that can suppress one or more aspects of an immune system, and that is not normally present in a mammal, by way of non-limiting example, B18R or dexamethasone.

[0076] By “single-strand break” is meant a region of single-stranded or double-stranded DNA in which one or more of the covalent bonds linking the nucleotides has been broken in one of the one or two strands.

[0077] By “double-strand break” is meant a region of double-stranded DNA in which one or more of the covalent bonds linking the nucleotides has been broken in each of the two strands.

[0078] By “nucleotide” is meant a nucleotide or a fragment or derivative thereof, by way of non-limiting example, a nucleobase, a nucleoside, a nucleotide-triphosphate, etc.

[0079] By “nucleoside” is meant a nucleotide or a fragment or derivative thereof, by way of non-limiting example, a nucleobase, a nucleoside, a nucleotide-triphosphate, etc.

[0080] By “gene editing” is meant altering the DNA sequence of a cell, by way of non-limiting example, by transfecting the cell with a protein that causes a mutation in the DNA of the cell.

[0081] By “gene-editing protein” is meant a protein that can, either alone or in combination with one or more other molecules, alter the DNA sequence of a cell, by way of non-limiting example, a nuclease, a transcription activator-like effector nuclease (TALEN), a zinc-finger nuclease, a meganuclease, a nickase, a clustered regularly interspaced short palindromic repeat (CRISPR)-associated protein or a natural or engineered variant, family-member, orthologue, fragment or fusion construct thereof.

[0082] By “repair template” is meant a nucleic acid containing a region of at least about 70% homology with a sequence that is within 10 kb of a target site of a gene-editing protein.

[0083] By “repeat sequence” is meant an amino-acid sequence that is present in more than one copy in a protein, to within at least about 10% homology, by way of non-limiting example, a monomer repeat of a transcription activator-like effector.

[0084] By “DNA-binding domain” is meant a region of a molecule that is capable of binding to a DNA molecule, by way of non-limiting example, a protein domain comprising one or more zinc fingers, a protein domain comprising one or more transcription activator-like (TAL) effector repeat sequences or a binding pocket of a small molecule that is capable of binding to a DNA molecule.

[0085] By “binding site” is meant a nucleic-acid sequence that is capable of being recognized by a gene-editing protein, DNA-binding protein, DNA-binding domain or a biologically active fragment or variant thereof or a nucleic-acid sequence for which a gene-editing protein, DNA-binding protein, DNA-binding domain or a biologically active fragment or variant thereof has high affinity, by way of non-limiting example, an about 20-base-pair sequence of DNA in exon 1 of the human BIRC5 gene.

[0086] By “target” is meant a nucleic acid that contains a binding site.

[0087] Other definitions are set forth in U.S. application Ser. No. 13/465,490, U.S. Provisional Application No. 61/664,494, U.S. Provisional Application No. 61/721,302, International Application No. PCT/US12/67966, U.S. Provisional Application No. 61/785,404, U.S. Provisional Application No. 61/842,874, International Application No. PCT/US13/68118, U.S. Provisional Application No. 61/934,397, U.S. application Ser. No. 14/296,220, U.S. Provisional Application No. 62/038,608, and U.S. Provisional Application No. 62/069,667, the contents of which are hereby incorporated by reference in their entireties.

[0088] Glycation and glycosylation are processes by which one or more sugar molecules are bound to a protein. It has now been discovered that altering the number or location of glycation and glycosylation sites can increase or decrease the stability of a protein. Certain embodiments are therefore directed to a protein with one or more glycation or glycosylation sites. In one embodiment, the protein is engineered to have more glycation or glycosylation sites than a natural variant of the protein. In another embodiment, the protein is engineered to have fewer glycation or glycosylation sites than a natural variant of the protein. In yet another embodiment, the protein has increased stability. In yet another embodiment, the protein has decreased stability.

[0089] It has been further discovered that in certain situations, including one or more steroids and/or one or more antioxidants in the transfection medium can increase in vivo transfection efficiency, in vivo reprogramming efficiency, and in vivo gene-editing efficiency. Certain embodiments are therefore directed to contacting a cell or patient with a glucocorticoid, such as hydrocortisone, prednisone, prednisolone, methylprednisolone, dexamethasone or betamethasone. Other embodiments are directed to a method for inducing a cell to express a protein of interest by contacting a cell with a medium containing a steroid and contacting the cell with one or more nucleic acid molecules. In one embodiment, the nucleic acid molecule comprises synthetic RNA. In another embodiment, the steroid is hydrocortisone. In yet another embodiment, the hydrocortisone is present in the medium at a concentration of between about 0.1 uM and about 10 uM, or about 1 uM. Other embodiments are directed to a method for inducing a cell in vivo to express a protein of interest by contacting the cell with a medium containing an antioxidant and contacting the cell with one or more nucleic acid molecules. In one embodiment, the antioxidant is ascorbic acid or ascorbic-acid-2-phosphate. In another embodiment, the ascorbic acid or ascorbic-acid-2-phosphate is present in the medium at a concentration of between about 0.5 mg/L and about 500 mg/L, including about 50 mg/L. Still other embodiments are directed to a method for reprogramming and/or gene-editing a cell in vivo by contacting the cell with a medium containing a steroid and/or an antioxidant and contacting the cell with one or more nucleic acid molecules, wherein the one or more nucleic acid molecules encodes one or more reprogramming and/or gene-editing proteins. In certain embodiments, the cell is present in an organism, and the steroid and/or antioxidant are delivered to the organism.

[0090] Adding transferrin to the complexation medium has been reported to increase the efficiency of plasmid transfection in certain situations. It has now been discovered that adding transferrin to the complexation medium can also increase the efficiency of in vivo transfection with synthetic RNA molecules. Certain embodiments are therefore directed to a method for inducing a cell in vivo to express a protein of interest by adding one or more synthetic RNA molecules and a transfection reagent to a solution containing transferrin. In one embodiment, the transferrin is present in the solution at a concentration of between about 1 mg/L and about 100 mg/L, such as about 5 mg/L. In another embodiment, the transferrin is recombinant.

[0091] Cells, tissues, organs, and organisms, including, but not limited to, humans, have several characteristics that can inhibit or prevent the delivery of nucleic acids, including, for example, the stratum corneum, which can serve as a barrier to foreign organisms and nucleic acids. These characteristics can thus inhibit the effects of therapeutics and cosmetics comprising nucleic acids. It has now been discovered that many of these characteristics can be circumvented or overcome using a patch comprising a flexible membrane and a plurality of needles, and that such a patch can serve as an effective and safe article for the delivery of nucleic acids. Certain embodiments are therefore directed to a nucleic acid delivery patch. In one embodiment, the nucleic acid delivery patch comprises a flexible membrane. In another embodiment, the nucleic acid delivery patch comprises a plurality of needles. In yet another embodiment, the plurality of needles are attached to the flexible membrane. In some embodiments, the patch comprises a nucleic acid. In one embodiment, the nucleic acid is present in solution. In one embodiment, the plurality of needles include one or more needles having a lumen. In another embodiment, the patch further comprises a second flexible membrane. In yet another embodiment, the flexible membrane and the second flexible membrane are arranged to form a cavity. In a further embodiment, the cavity contains a nucleic acid. In a still further embodiment, the membrane comprises one or more holes through which a nucleic acid can pass. In a still further embodiment, one or more holes and one or more needles having a lumen are arranged to allow the passage of a solution containing a nucleic acid through at least one of the one or more holes and through at least one of the one or more needles having a lumen. In some embodiments, the patch is configured to deliver a solution to the skin. In one embodiment, the solution comprises a nucleic acid. In another embodiment, the solution comprises a vehicle. In yet another embodiment, the vehicle is a lipid or lipidoid. In a still further embodiment, the vehicle is a lipid-based transfection reagent.

[0092] The cell membrane can serve as a barrier to foreign nucleic acids. It has now been discovered that combining the patch of the present invention with an electric field can increase the efficiency of nucleic acid delivery. Certain embodiments are therefore directed to a nucleic acid delivery patch comprising a plurality of needles, wherein at least two needles form part of a high-voltage circuit. In one embodiment, the high-voltage circuit generates a voltage greater than about 10V. In another embodiment, the high-voltage circuit generates a voltage greater than about 20V. In yet another embodiment, an electric field is produced between two of the needles. In a further embodiment, the magnitude of the electric field is at least about 100V/cm. In a still further embodiment, the magnitude of the electric field is at least about 200V/cm. In some embodiments, the patch is configured to deliver a nucleic acid to the epidermis. In other embodiments, the patch is configured to deliver a nucleic acid to the dermis. In still other embodiments, the patch is configured to deliver a nucleic acid to sub-dermal tissue. In still other embodiments, the patch is configured to deliver a nucleic acid to muscle. Certain embodiments are directed to a nucleic acid delivery patch comprising a plurality of electrodes. In one embodiment, the plurality of electrodes is attached to a flexible membrane. Other embodiments are directed to a nucleic acid delivery patch comprising a rigid structure. In one embodiment, a plurality of electrodes are attached to the rigid structure.

[0093] Other embodiments are directed to a method for delivering a nucleic acid to a cell in vivo comprising applying a nucleic acid to a tissue containing a cell in vivo. In one embodiment, the method further comprises applying a transient electric field in the vicinity of the cell. In another embodiment, the method results in the cell in vivo internalizing the nucleic acid. In yet another embodiment, the nucleic acid comprises synthetic RNA. In a further embodiment, the method further results in the cell internalizing a therapeutically or cosmetically effective amount of the nucleic acid. In one embodiment, the cell is a skin cell. In another embodiment, the cell is a muscle cell. In yet another embodiment, the cell is a dermal fibroblast. In a further embodiment, the cell is a keratinocyte. In a still further embodiment, the cell is a myoblast. In some embodiments, the nucleic acid comprises a protein of interest. In one embodiment, the protein of interest is a fluorescent protein. In another embodiment, the protein of interest is an extracellular-matrix protein. In yet another embodiment, the protein of interest is a member of the group: elastin, collagen, laminin, fibronectin, vitronectin, lysyl oxidase, elastin binding protein, a growth factor, fibroblast growth factor, transforming growth factor beta, granulocyte colony-stimulating factor, a matrix metalloproteinase, an actin, fibrillin, microfibril-associated glycoprotein, a lysyl-oxidase-like protein, platelet-derived growth factor, a lipase, an uncoupling protein, thermogenin, and a protein involved with pigment production. In some embodiments, the method further comprises delivering the nucleic acid to the epidermis. In other embodiments, the method further comprises delivering the nucleic acid to the dermis. In still other embodiments, the method further comprises delivering the nucleic acid below the dermis. In one embodiment, the delivering is by injection. In another embodiment, the delivering is by injection using a micro-needle array. In yet another embodiment, the delivering is by topical administration. In a further embodiment, the delivering comprises disruption or removal of a part of the tissue. In a still further embodiment, the delivering comprises disruption or removal of the stratum corneum. In some embodiments, the nucleic acid is present in solution. In one embodiment, the solution comprises a growth factor. In another embodiment, the growth factor is a member of the group: a fibroblast growth factor and a transforming growth factor. In yet another embodiment, the growth factor is a member of the group: basis fibroblast growth factor and transforming growth factor beta. In other embodiments, the solution comprises cholesterol.

[0094] In another embodiment, the method further comprises contacting the cell with one or more nucleic acid molecules. In yet another embodiment, at least one of the one or more nucleic acid molecules encodes a protein of interest. In a further embodiment, the method results in the cell expressing the protein of interest. In a still further embodiment, the method results in the cell expressing a therapeutically or cosmetically effective amount of the protein of interest.

[0095] In another embodiment, the cell is contacted with a nucleic acid molecule. In yet another embodiment, the method results in the cell internalizing the nucleic acid molecule. In a further embodiment, the method results in the cell internalizing a therapeutically or cosmetically effective amount of the nucleic acid molecule. In one embodiment, the nucleic acid encodes a protein of interest. In one embodiment, the nucleic acid molecule comprises a member of the group: a dsDNA molecule, a ssDNA molecule, a dsRNA molecule, a ssRNA molecule, a plasmid, an oligonucleotide, a synthetic RNA molecule, a miRNA molecule, an mRNA molecule, and an siRNA molecule.

[0096] Synthetic RNA comprising only canonical nucleotides can bind to pattern recognition receptors, can be recognized as a pathogen-associated molecular pattern, and can trigger a potent immune response in cells, which can result in translation block, the secretion of inflammatory cytokines, and cell death. It has now been discovered that synthetic RNA comprising certain non-canonical nucleotides can evade detection by the innate immune system, and can be translated at high efficiency into protein. It has been further discovered that synthetic RNA comprising at least one member of the group: 5-hydroxycytidine, 5-hydroxymethylcytidine, 5-carboxycytidine, 5-formylcytidine, 5-hydroxyuridine, 5-hydroxymethyluridine, 5-carboxyuridine, and 5-formyluridine can evade detection by the innate immune system, and can be translated at high efficiency into protein. Certain embodiments are therefore directed to a method for inducing a cell to express a protein of interest comprising contacting a cell with synthetic RNA. Other embodiments are directed to a method for transfecting a cell with synthetic RNA comprising contacting a cell with a solution comprising one or more synthetic RNA molecules. Still other embodiments are directed to a method for treating a patient comprising administering to the patient synthetic RNA. In one embodiment, the synthetic RNA comprises at least one member of the group: 5-hydroxycytidine, 5-hydroxymethylcytidine, 5-carboxycytidine, 5-formylcytidine, 5-hydroxyuridine, 5-hydroxymethyluridine, 5-carboxyuridine, and 5-formyluridine. In another embodiment, the synthetic RNA encodes a protein of interest. Exemplary RNAs may contain combinations and levels of non-canonical and non-canonical nucleotides as described elsewhere herein, including with respect to the expression of any protein of interest described herein. In yet another embodiment, the method results in the expression of the protein of interest. In a further embodiment, the method results in the expression of the protein of interest in the patient's skin.

[0097] It has now been further discovered that contacting a cell with a steroid can suppress the innate immune response to foreign nucleic acids, and can increase the efficiency of nucleic acid delivery and translation. Certain embodiments are therefore directed to contacting a cell with a steroid. Other embodiments are directed to administering a steroid to a patient. In one embodiment, the steroid is hydrocortisone. In another embodiment, the steroid is dexamethasone. Still other embodiments are directed to administering to a patient a member of the group: an antibiotic, an antimycotic, and an RNAse inhibitor.

[0098] Other embodiments are directed to a method for delivering a nucleic acid to a cell in vivo. Still other embodiments are directed to a method for inducing a cell in vivo to express a protein of interest. Still other embodiments are directed to a method for treating a patient. In one embodiment, the method comprises disrupting the stratum corneum. In another embodiment, the method comprises contacting a cell with a nucleic acid. In yet another embodiment, the method results in the cell internalizing the nucleic acid. In a further embodiment, the method results in the cell expressing the protein of interest. In a still further embodiment, the method results in the expression of the protein of interest in the patient. In a still further embodiment, the method results in the amelioration of one or more of the patient's symptoms. In a still further embodiment, the patient is in need of the protein of interest. In a still further embodiment, the patient is deficient in the protein of interest.

[0099] Still other embodiments are directed to a method for treating a patient comprising delivering to a patient a composition. In one embodiment, the composition comprises albumin that is treated with an ion-exchange resin or charcoal. In another embodiment, the composition comprises one or more nucleic acid molecules. In yet another embodiment, at least one of the one or more nucleic acid molecules encodes a protein of interest. In one embodiment, the method results in the expression of the protein in the patient's skin. In another embodiment, the method results in the expression of a therapeutically or cosmetically effective amount of the protein of interest in the patient. In yet another embodiment, the method comprises administering a steroid. In a further embodiment, the steroid is a member of the group: hydrocortisone and dexamethasone.

[0100] Certain embodiments are directed to a synthetic RNA molecule. In one embodiment, the synthetic RNA molecule encodes a protein of interest. In another embodiment, the synthetic RNA molecule comprises a member of the group: 5-hydroxycytidine, 5-hydroxymethylcytidine, 5-carboxycytidine, 5-formylcytidine, 5-hydroxyuridine, 5-hydroxymethyluridine, 5-carboxyuridine, and 5-formyluridine. Other embodiments are directed to a cosmetic composition. In one embodiment, the cosmetic composition comprises albumin. In another embodiment, the albumin is treated with an ion-exchange resin or charcoal. In yet another embodiment, the cosmetic composition comprises a nucleic acid molecule. In a further embodiment, the cosmetic composition comprises both albumin and a nucleic acid molecule. Still other embodiments are directed to a cosmetic treatment article comprising a cosmetic composition contained in a device configured to deliver the composition to a patient. Still other embodiments are directed to a device configured to deliver a cosmetic composition to a patient. In one embodiment, the nucleic acid molecule encodes a member of the group: elastin, collagen, tyrosinase, melanocortin 1 receptor, and hyaluronan synthase.

[0101] Certain proteins have long half-lives, and can persist in tissues for several hours, days, weeks, months or years. It has now been discovered that certain methods of treating a patient can result in accumulation of one or more proteins, including, for example, one or more beneficial proteins. Certain embodiments are therefore directed to a method for treating a patient comprising delivering to a patient in a series of doses a nucleic acid encoding one or more proteins. In one embodiment the nucleic acid comprises synthetic RNA. In another embodiment, a first dose is given at a first time-point. In yet another embodiment, a second dose is given at a second time-point. In a further embodiment, the amount of at least one of the one or more proteins in the patient at the second time-point is greater than the amount of said protein at the first time-point. In a still further embodiment, the method results in the accumulation of said protein in the patient.

[0102] Other embodiments are directed to a therapeutic composition comprising a nucleic acid molecule encoding one or more proteins, wherein at least one of the one or more proteins is an extracellular matrix protein. Still other embodiments are directed to a cosmetic composition comprising a nucleic acid molecule encoding one or more proteins, wherein at least one of the one or more proteins is an extracellular matrix protein.

[0103] Pigmentation disorders can cause severe symptoms in patients. It has now been discovered that pigmentation disorders can be treated by delivering to a patient a nucleic acid encoding tyrosinase. Certain embodiments are therefore directed to a method for treating a pigmentation disorder. Other embodiments are directed to a method for altering the pigmentation of a patient. In one embodiment, the method comprises delivering to a patient a nucleic acid encoding tyrosinase. Other embodiments are directed to a cosmetic composition comprising a nucleic acid encoding tyrosinase. Still other embodiments are directed to a therapeutic composition comprising a nucleic acid encoding tyrosinase. Still other embodiments are directed to a method for increasing the ultraviolet absorption of a patient's skin. In one embodiment the method comprises delivering to a patient a nucleic acid encoding tyrosinase. In another embodiment, the method results in an increase in the ultraviolet absorption of the patient's skin. Still other embodiments are directed to a method for reducing photodamage to a person's skin upon exposure to ultraviolet light. In one embodiment, the method results in the reduction of photodamage to the person's skin upon exposure to ultraviolet light. Still other embodiments are directed to a method for treating xeroderma pigmentosum. In one embodiment, the method comprises delivering to a patient a nucleic acid encoding tyrosinase. Still other embodiments are directed to a method for treating epidermolysis bullosa. In one embodiment, the method comprises delivering to a patient a nucleic acid encoding collagen type VII. In another embodiment, the method comprises delivering to a patient a nucleic acid encoding melanocortin 1 receptor. Still other embodiments are directed to a method for treating xerosis. In one embodiment, the method comprises delivering to a patient a nucleic acid encoding a hyaluronan synthase. In another embodiment, the patient is diagnosed with atopic dermatitis. In yet another embodiment, the patient is diagnosed with ichthyosis. Certain embodiments are directed to a method for treating a cosmetic condition. Other embodiments are directed to a method for inducing tissue healing. In one embodiment, the method comprises delivering to a patient a nucleic acid encoding a hyaluronan synthase. In another embodiment, the cosmetic condition is a member of the group: wrinkles, sagging skin, thin skin, discoloration, and dry skin. In yet another embodiment, the patient has had cataract surgery. In some embodiments, the nucleic acid is synthetic RNA. In other embodiments, the method results in the amelioration of one or more of the patient's symptoms. Other embodiments are directed to a method for treating an indication by delivering to a cell or a patient a nucleic acid encoding a protein or a peptide. Still other embodiments are directed to a composition comprising a nucleic acid encoding a protein or a peptide. Indications that can be treated using the methods and compositions of the present invention and proteins and peptides that can be encoded by compositions of the present invention are set forth in Table 1, and are given by way of example, and not by way of limitation. In one embodiment, the indication is selected from Table 1. In another embodiment the protein or peptide is selected from Table 1. In yet another embodiment, the indication and the protein or peptide are selected from the same row of Table 1. In a further embodiment, the protein of interest is a member of the group: UCP1, UCP2, and UCP3. Other embodiments are directed to methods for inducing a cell to express a plurality of proteins of interest. In one embodiment, the proteins of interest include at least two members of the group: a lipase, UCP1, UCP2, and UCP3. In another embodiment, the proteins of interest include a lipase and a member of the group: UCP1, UCP2, and UCP3. In another embodiment, the protein is a gene-editing protein. In yet another embodiment, the gene-editing protein targets a gene that is at least partly responsible for a disease phenotype. In yet another embodiment, the gene-editing protein targets a gene that encodes a protein selected from Table 1. In still another embodiment, the gene-editing protein corrects or eliminates, either alone or in combination with one or more other molecules or gene-editing proteins, a mutation that is at least partly responsible for a disease phenotype.

TABLE 1
Ilustrative Indications

| Ilustrative Indication | Ilustrative Protein/Peptide |
|---|---|
| Acne | Retinol Dehydrogenase 10 |
| Aging | Elastin |
| Aging | Collagen Type I |
| Aging | Collagen Type III |
| Aging | Collagen Type VII |
| Aging | Hyaluronan Synthase |
| Aging | Telomerase Reverse Transcriptase |
| Albinism | Tyrosinase |
| Alport Syndrome | Collagen Type IV |
| Anemia | Erythropoietin |
| Atopic Dermatitis | Filaggrin |
| Cutis Laxa | Elastin |
| Dystrophic Epidermolysis Bullosa | Collagen Type VII |
| Ehlers-Danlos Syndrome | Collagen Type V |
| Ehlers-Danlos Syndrome | Collagen Type I |
| Epidermolysis bullosa, lethal | ADAM17 |
| acantholytic | |
| Epidermolysis bullosa, type IV | Collagen Type III |
| Erythropoietic Protoporphyria | Ferrochelatase |
| Excess Fat | Thermogenin |
| Excess Fat | Lipase |
| Hypotrichosis | ADAM17 |
| Ichthyosis Vulgaris | Filaggrin |
| Infections | Genetic Antibiotics |
| | (e.g. Anti-Sigma Factors) |
| Inflammatory and Bullous Skin | Desmoglein 2 |
| Bowel Syndrome | |
| Keratosis Pilaris | Retinol Dehydrogenase 10 |
| Oily Skin | Retinol Dehydrogenase 10 |
| Osteoarthritis | Hyaluronan Synthase |
| Pemphigus Vulgaris | Plakophilin-1 |
| Pseudoxanthoma elasticum | Elastin |
| Psoriasis | Retinol Dehydrogenase 10 |
| Scar Treatment | Tyrosinase |
| Scarring | Elastin |
| Scarring | Collagen Type I |
| Scarring | Collagen Type III |
| Skin Cancer | Interferon |
| Striate Palmoplantar Keratoderma | ADAM17 |
| Tanning | Tyrosinase |
| Vitiligo | Melanocyte-Stimulating Hormone |
| Vitiligo | Tyrosinase |
| Warts | Interferon |
| Wound Healing | Elastin |
| Wound Healing | Collagen Type I |
| Wound Healing | Collagen Type III |
| Xeroderma Pigmentosum | DNA Polymerase Eta |

[0104] Additional illustrative targets of the present invention include the cosmetic targets listed in Table 6 of International Patent Publication No. WO 2013/151671, the contents of which are hereby incorporated by reference in their entirety.

[0105] Further, the present compositions and methods may be used to alter a biological and/or physiological process to, for example, reduce skin sagging, increase skin thickness, increase skin volume, reduce the number of wrinkles, the length of wrinkles and/or the depth of wrinkles, increase skin tightness, firmness, tone and/or elasticity, increase skin hydration and ability to retain moisture, water flow and osmotic balance, increase the levels of skin lipids; increase the extracellular matrix and/or adhesion and communication polypeptides; increase skin energy production; utilization and conservation; improve oxygen utilization; improve skin cell life; improve skin cell immunity defense, heat shock stress response, antioxidant defense capacity to neutralize free radicals, and/or toxic defense; improve the protection and recovery from ultraviolet rays; improve skin cell communication and skin cell innervations; improve cell cohesion/adhesion; improve calcium mineral and other mineral metabolism; improve cell turnover; and improve cell circadian rhythms.

[0106] Further still, in some embodiments, the present compositions may be used to treat a disease, disorder and/or condition and/or may alter, modify or change the appearance of a member of the integumentary system of a subject suffering from a disease, disorder and/or condition such as, but not limited to, acne vulgaris, acne aestivalis, acne conglobata, acne cosmetic, acne fulminans, acne keloidalis nuchae, acne mechanica, acne medicamentosa, acne miliaris necrotica, acne necrotica, acne rosacea, actinic keratosis, acne vulgaris, acne aestivalis, acne conglobata, acne cosmetic, acne fulminans, acne keloidalis nuchae, acne mechanica, acne medicamentosa, acne miliaris necrotica, acne necrotica, acne rosacea, acute urticaria, allergic contact dermatitis, alopecia areata, angioedema, athlete's foot, atopic dermatitis, autoeczematization, baby acne, balding, bastomycosis, blackheads, birthmarks and other skin pigmentation problems, boils, bruises, bug bites and stings, burns, cellulitis, chiggers, chloracne, cholinergic or stress uricara, chronic urticara, cold type urticara, confluent and reticulated papillomatosis, corns, cysts, dandruff, dermatitis herpetiformis, dermatographism, dyshidrotic eczema, diaper rash, dry skin, dyshidrosis, ectodermal dysplasia such as, hyprohidrotic ectodermal dysplasia and X-linked hyprohidrotic ectodermal dysplasia, eczema, epidermaodysplasia verruciformis, erythema nodosum, excoriated acne, exercise-induced anaphylasis folliculitis, excess skin oil, folliculitis, freckles, frostbite, fungal nails, hair density, hair growth rate, halogen acne, hair loss, heat rash, hematoma, herpes simplex infections (e.g. non-genital), hidradenitis suppurativa, hives, hyperhidrosis, hyperpigmentation, hypohidrotic ectodermal dysplasia, hypopigmentation, impetigo, ingrown hair, heat type urticara, ingrown toenail, infantile acne or neonatal acne, itch, irritant contact dermatitis, jock itch, keloid, keratosis pilaris, lichen planus, lichen sclerosus, lupus miliaris disseminatus faciei, melasma, moles, molluscum contagiosum, nail growth rate, nail health, neurodermatitis, nummular eczema, occupational acne, oil acne, onychomycosis, physical urticara, pilonidal cyst, pityriasis rosea, pityriasis versicolor, poison ivy, pomade acne, pseudofolliculitis barbae or acne keloidalis nuchae, psoriasis, psoriatic arthritis, pressure or delayed pressue urticara, puncture wounds such as cuts and scrapes, rash, rare or water type urticara, rhinoplasty, ringworm, rosacea, rothmund-thomson syndrome, sagging of the skin, scabis, scars, seborrhea, seborrheic dermatitis, shingles, skin cancer, skin tag, solar type urticara, spider bite, stretch marks, sunburn, tar acne, tropical acne, thinning of skin, thrush, tinea versicolor, transient acantholytic dermatosis, tycoon's cap or acne necrotica miliaris, uneven skin tone, varicose veins, venous eczema, vibratory angioedema, vitiligo, warts, Weber-Christian disease, wrinkles, x-linked hypohidrotic ectodermal dysplasia, xerotic eczema, yeast infection and general signs of aging.

[0107] In some embodiments, there is provided methods of treating dry skin with the present compositions. In some embodiments profilaggrin (a protein which is converted to filaggrin) is a protein of interest (e.g. when treating ichthyosis vulgaris).

[0108] In some embodiments, there is provided methods of treating any one of the various types of psoriasis (e.g. plague psoriasis, guttate psoriasis, pustular psoriasis, inverse psoriasis, and erythrodermic psoriasis). In various embodiments, the protein of interest is any of the products of the genes psoriasis susceptibility 1 through 9 (PSORS1-PSORS9).

[0109] Various embodiments relate to the treatment of eczema (e.g. atopic dermatitis, nummular eczema, dyshidrotic eczema, seborrheic dermatitis, irritant contact dermatitis, allergic contact dermatitis, dyshidrosis, venous eczema, dermatitis herpetiformis, neurodermatitis, autoeczematization and xerotic eczema) and, optionally, one or more of the following may be targeted: filaggrin; three genetic variants, ovo-like 1 (OVOL1), actin-like 9 (ACTL9) and kinesin family member 3 A (KIF3A) have been associated with eczema; and the genes brain-derived neurotrophic factor (BDNF) and tachykinin, precursor 1 (TAC1).

[0110] Hives, or urticaria, including, but not limited to, acute urticaria, chronic urticara and angioedema, physical urticara, pressure or delayed pressue urticara, cholinergic or stress uricara, cold type urticara, heat type urticara, solar type urticara, rare or water type urticara, vibratory angioedema, exercise-induced anaphylasis and dermatographism may be treated with the present compositions by, for example, targeting PLCG-2.

[0111] Various embodiments relate to the treatment of rosacea, which includes, but is not limited to, erthematotelangiectatic rosacea, papulopustular rosacea, phymatous rosacea, and ocular rosacea. Optionally, cathelicidin antimicrobial peptide (CAMP) and/or kallikrein-related peptidase 5 (also known as stratum corneum tryptic enzyme (SCTE)) are proteins of interest.

[0112] In some embodiments, there is provided methods of treating acne with the present compositions. For example, acne may include, but is not limited to, acneiform eruptions, acne aestivalis, acne conglobata, acne cosmetic, acne fulminans, acne keloidalis nuchae, acne mechanica, acne medicamentosa, acne miliaris necrotica, acne necrotica, acne rosacea, baby acne, blackheads, chloracne, excoriated acne, halogen acne, infantile acne or neonatal acne, lupus miliaris disseminatus faciei, occupational acne, oil acne, pomade acne, tar acne, tropical acne, tycoon's cap or acne necrotica miliaris, pseudofolliculitis barbae or acne keloidalis nuchae, and hidradenitis suppurativa. In these embodiments, the protein of interest may be one or more matrix metalloproteinases (MMP), e.g., matrix metalloproteinase-1 (MMP-1 or interstitial collagenase), matrix metalloproteinase-9 (MMP-9), and matrix metalloproteinase-13 (MMP-13).

[0113] In further embodiments, vitiligo is treated with the present compositions, e.g. wherein the NLR family, pyrin domain containing 1 gene (NALP1) gene is targeted.

[0114] In some embodiments, the present compositions find use in the treatment of hyprohidrotic ectodermal dysplasia (HED), e.g. via the ectodysplasin A gene (EDA), receptor (EDAR), and receptor associated death domain (EDARADD).

[0115] In some embodiments, the present compositions find use in the treatment of balding, or hair thinning (e.g. male pattern baldness, or androgenetic alopecia (AGA)) and, optionally, one or more of the following may be the protein of interest: androgen receptor (AR), ectodysplasin A2 receptor (EDA2R) and lysophosphatidic acid receptor 6 (P2RY5).

[0116] The present compositions also find use in methods of treating scars and stretch marks (striae), e.g. via collagen, ribosomal s6 kinase, sectrected phosphoprotein 1 (also known as osteopontin), or transforming growth factor beta 3.

[0117] Epidermodysplasia verruciformis (also known as Lutz-Lewandowsky epidermodysplasia), a rare autosomal recessive genetic hereditary skin disorder, may also be treated with compositions of the present invention, e.g. by targetted transmembrane channel-like 6 (EVER1) or transmembrane channellike 8 (EVER2) genes.

[0118] In some embodiments, skin sagging, thinning or wrinkling may be treated with present composition, e.g. by targeting one or more of the proteins of interest such as collagen, elastin, fibroblast growth factor 7, TIMP metallopeptidase inhibitors, matrix metallopeptidases, superoxide dismutase and other extracellular matrix proteins and proteoglycans.

[0119] Further embodiments are used in tanning of the skin, such as via melanocyte-stimulating hormone and/or pro-opiomelanocortin.

[0120] In some embodiments, the present compositions may be used for wound treatment. In some embodiments, methods of treating wounds with the present compositions comprises additional steps of, for example, cleaning the wound bed to facilitate wound healing and closure, including, but not limited to: debridement, sharp debridement (surgical removal of dead or infected tissue from a wound), optionally including chemical debriding agents, such as enzymes, to remove necrotic tissue; wound dressings to provide the wound with a moist, warm environment and to promote tissue repair and healing (e.g., wound dressings comprising hydrogels (e.g., AQUASORB®; DUODERM®), hydrocolloids (e.g., AQUACEL®; COMFEEL®), foams (e.g., LYOFOAM®; SPYROSORB®), and alginates (e.g., ALGISITE®; CURASORB®); administration of growth factors to stimulate cell division and proliferation and to promote wound healing e.g. becaplermin; and (iv) soft-tissue wound coverage, a skin graft may be necessary to obtain coverage of clean, non-healing wounds (e.g., autologous skin grafts, cadaveric skin graft, bioengineered skin substitutes (e.g., APLIGRAF®; DERMAGRAFT®)).

[0121] In various embodiments, a variety of cancers are treated with the present compositions (e.g., colorectal cancer, gallbladder cancer, lung cancer, pancreatic cancer, and stomach cancer). In some embodiments, skin cancer is treated with the present compositions. For instance, basal cell cancer (BCC), squamous cell cancer (SCC), and melanoma. In some embodiments, the present compositions are used adjuvant to complete circumferential peripheral and deep margin assessment, Mohs surgery, radiation (e.g. external beam radiotherapy or brachytherapy), chemotherapy (including but not limited to topical chemotherapy, e.g. with imiquimod or 5-fluorouracil), and cryotherapy. The present compositions also find use in the treatment of various stages of cancers, including skin cancers (e.g. basal cell cancer (BCC), squamous cell cancer (SCC), and melanoma), such as a stage of the American Joint Committee on Cancer (AJCC) TNM system (e.g. one or more of TX, T0, Tis, T1, T1a, T1b, T2, T2A, T2B, T3, T3a, T3b, T4, T4a, T4b, NX, N0, N1, N2, N3, M0, M1a, M1b, M1c) and/or a staging system (e.g. Stage 0, Stage IA, Stage IB, Stage IIA, Stage IIB, Stage IIC, Stage IIIA, Stage IIIB, Stage IIIC, Stage IV).

[0122] In various embodiments, one or more rare diseases are treated with the present compositions, including, by way of illustration, Erythropoietic Protoporphyria, Hailey-Hailey Disease, Epidermolysis Bullosa (EB), Xeroderma Pigmentosum, Ehlers-Danlos Syndrome, Cutis Laxa, Protein C & Protein S Deficiency, Alport Syndrome, Striate Palmoplantar Keratoderma, Lethal Acantholytic EB, Pseudoxanthoma Elasticum (PXE), Ichthyosis Vulgaris, Pemphigus Vulgaris, and Basal Cell Nevus Syndrome.

[0123] In certain situations, it may be desirable to replace animal-derived components with non-animal-derived and/or recombinant components, in part because non-animal-derived and/or recombinant components can be produced with a higher degree of consistency than animal-derived components, and in part because non-animal-derived and/or recombinant components carry less risk of contamination with toxic and/or pathogenic substances than do animal-derived components. Certain embodiments are therefore directed to a protein that is non-animal-derived and/or recombinant. Other embodiments are directed to a medium, wherein some or all of the components of the medium are non-animal-derived and/or recombinant.

[0124] Other embodiments are directed to a method for transfecting a cell in vivo. In one embodiment, a cell in vivo is transfected with one or more nucleic acids, and the transfection is performed using a transfection reagent, such as a lipid-based transfection reagent. In one embodiment, the one or more nucleic acids includes at least one RNA molecule. In another embodiment, the cell is transfected with one or more nucleic acids, and the one or more nucleic acids encodes at least one of: p53, TERT, a cytokine, a secreted protein, a membrane-bound protein, an enzyme, a gene-editing protein, a chromatin-modifying protein, a DNA-binding protein, a transcription factor, a histone deacetylase, a pathogen-associated molecular pattern, and a tumor-associated antigen or a biologically active fragment, analogue, variant or family-member thereof. In another embodiment, the cell is transfected repeatedly, such as at least about 2 times during about 10 consecutive days, or at least about 3 times during about 7 consecutive days, or at least about 4 times during about 6 consecutive days.

[0125] Reprogramming can be performed by transfecting cells with one or more nucleic acids encoding one or more reprogramming factors. Examples of reprogramming factors include, but are not limited to: Oct4 protein, Sox2 protein, Klf4 protein, c-Myc protein, l-Myc protein, TERT protein, Nanog protein, Lin28 protein, Utf1 protein, Aicda protein, miR200 micro-RNA, miR302 micro-RNA, miR367 micro-RNA, miR369 micro-RNA and biologically active fragments, analogues, variants and family-members thereof. Certain embodiments are therefore directed to a method for reprogramming a cell in vivo. In one embodiment, the cell in vivo is reprogrammed by transfecting the cell with one or more nucleic acids encoding one or more reprogramming factors. In one embodiment, the one or more nucleic acids includes an RNA molecule that encodes Oct4 protein. In another embodiment, the one or more nucleic acids also includes one or more RNA molecules that encodes Sox2 protein, Klf4 protein, and c-Myc protein. In yet another embodiment, the one or more nucleic acids also includes an RNA molecule that encodes Lin28 protein. In one embodiment, the cell is a human skin cell, and the human skin cell is reprogrammed to a pluripotent stem cell. In another embodiment, the cell is a human skin cell, and the human skin cell is reprogrammed to a glucose-responsive insulin-producing cell. Examples of other cells that can be reprogrammed and other cells to which a cell can be reprogrammed include, but are not limited to: skin cells, pluripotent stem cells, mesenchymal stem cells, 8-cells, retinal pigmented epithelial cells, hematopoietic cells, cardiac cells, airway epithelial cells, neural stem cells, neurons, glial cells, bone cells, blood cells, and dental pulp stem cells. In one embodiment, the cell is contacted with a medium that supports the reprogrammed cell. In one embodiment, the medium also supports the cell.

[0126] Importantly, infecting skin cells with viruses encoding Oct4, Sox2, Klf4, and c-Myc, combined with culturing the cells in a medium that supports the growth of cardiomyocytes, has been reported to cause reprogramming of the skin cells to cardiomyocytes, without first reprogramming the skin cells to pluripotent stem cells (See Efs et al Nat Cell Biol. 2011; 13:215-22, the contents of which are hereby incorporated by reference). In certain situations, direct reprogramming (reprogramming one somatic cell to another somatic cell without first reprogramming the somatic cell to a pluripotent stem cell, also known as “transdifferentiation”) may be desirable, in part because culturing pluripotent stem cells can be time-consuming and expensive, the additional handling involved in establishing and characterizing a stable pluripotent stem cell line can carry an increased risk of contamination, and the additional time in culture associated with first producing pluripotent stem cells can carry an increased risk of genomic instability and the acquisition of mutations, including point mutations, copy-number variations, and karyotypic abnormalities. Certain embodiments are therefore directed to a method for reprogramming a somatic cell in vivo, wherein the cell is reprogrammed to a somatic cell, and wherein a characterized pluripotent stem-cell line is not produced.

[0127] It has been further discovered that, in certain situations, fewer total transfections may be required to reprogram a cell according to the methods of the present invention than according to other methods. Certain embodiments are therefore directed to a method for reprogramming a cell in vivo, wherein between about 1 and about 12 transfections are performed during about 20 consecutive days, or between about 4 and about 10 transfections are performed during about 15 consecutive days, or between about 4 and about 8 transfections are performed during about 10 consecutive days. It is recognized that when a cell is contacted with a medium containing nucleic acid molecules, the cell may likely come into contact with and/or internalize more than one nucleic acid molecule either simultaneously or at different times. A cell can therefore be contacted with a nucleic acid more than once, e.g. repeatedly, even when a cell is contacted only once with a medium containing nucleic acids.

[0128] Of note, nucleic acids can contain one or more non-canonical, or “modified”, residues (e.g. a residue other than adenine, guanine, thymine, uracil, and cytosine or the standard nucleoside, nucleotide, deoxynucleoside or deoxynucleotide derivatives thereof). Of particular note, pseudouridine-5-triphosphate can be substituted for uridine-5-triphosphate in an in vitro-transcription reaction to yield synthetic RNA, wherein up to 100% of the uridine residues of the synthetic RNA may be replaced with pseudouridine residues. In vitro-transcription can yield RNA with residual immunogenicity, even when pseudouridine and 5-methylcytidine are completely substituted for uridine and cytidine, respectively (See, e.g., Angel. Reprogramming Human Somatic Cells to Pluripotency Using RNA [Doctoral Thesis]. Cambridge, Mass.: MIT; 2011, the contents of which are hereby incorporated by reference). For this reason, it is common to add an immunosuppressant to the transfection medium when transfecting cells with RNA. In certain situations, adding an immunosuppressant to the transfection medium may not be desirable, in part because the recombinant immunosuppressant most commonly used for this purpose, B18R, can be expensive and difficult to manufacture. It has now been discovered that cells in vivo can be transfected and/or reprogrammed according to the methods of the present invention, without using B18R or any other immunosuppressant. It has been further discovered that reprogramming cells in vivo according to the methods of the present invention without using immunosuppressants can be rapid, efficient, and reliable. Certain embodiments are therefore directed to a method for transfecting a cell in vivo, wherein the transfection medium does not contain an immunosuppressant. Other embodiments are directed to a method for reprogramming a cell in vivo, wherein the transfection medium does not contain an immunosuppressant. In certain situations, for example when using a high cell density, it may be beneficial to add an immunosuppressant to the transfection medium. Certain embodiments are therefore directed to a method for transfecting a cell in vivo, wherein the transfection medium contains an immunosuppressant. Other embodiments are directed to a method for reprogramming a cell in vivo, wherein the transfection medium contains an immunosuppressant. In one embodiment, the immunosuppressant is B18R or a biologically active fragment, analogue, variant or family-member thereof or dexamethasone or a derivative thereof. In one embodiment, the transfection medium does not contain an immunosuppressant, and the nucleic-acid dose is chosen to prevent excessive toxicity. In another embodiment, the nucleic-acid dose is less than about 1 mg/cm² of tissue or less than about 1 mg/100,000 cells or less than about 10 mg/kg.

[0129] Reprogrammed cells produced according to certain embodiments of the present invention are suitable for therapeutic and/or cosmetic applications as they do not contain exogenous DNA sequences, and they are not exposed to animal-derived or human-derived products, which may be undefined, and which may contain toxic and/or pathogenic contaminants. Furthermore, the high speed, efficiency, and reliability of certain embodiments of the present invention may reduce the risk of acquisition and accumulation of mutations and other chromosomal abnormalities. Certain embodiments of the present invention can thus be used to generate cells that have a safety profile adequate for use in therapeutic and/or cosmetic applications. For example, reprogramming cells using RNA and the medium of the present invention, wherein the medium does not contain animal or human-derived components, can yield cells that have not been exposed to allogeneic material. Certain embodiments are therefore directed to a reprogrammed cell that has a desirable safety profile. In one embodiment, the reprogrammed cell has a normal karyotype. In another embodiment, the reprogrammed cell has fewer than about 5 copy-number variations (CNVs) relative to the patient genome, such as fewer than about 3 copy-number variations relative to the patient genome, or no copy-number variations relative to the patient genome. In yet another embodiment, the reprogrammed cell has a normal karyotype and fewer than about 100 single nucleotide variants in coding regions relative to the patient genome, or fewer than about 50 single nucleotide variants in coding regions relative to the patient genome, or fewer than about 10 single nucleotide variants in coding regions relative to the patient genome.

[0130] Endotoxins and nucleases can co-purify and/or become associated with other proteins, such as serum albumin. Recombinant proteins, in particular, can often have high levels of associated endotoxins and nucleases, due in part to the lysis of cells that can take place during their production. Endotoxins and nucleases can be reduced, removed, replaced or otherwise inactivated by many of the methods of the present invention, including, for example, by acetylation, by addition of a stabilizer such as sodium octanoate, followed by heat treatment, by the addition of nuclease inhibitors to the albumin solution and/or medium, by crystallization, by contacting with one or more ion-exchange resins, by contacting with charcoal, by preparative electrophoresis or by affinity chromatography. It has now been discovered that partially or completely reducing, removing, replacing or otherwise inactivating endotoxins and/or nucleases from a medium and/or from one or more components of a medium can increase the efficiency with which cells can be transfected and reprogrammed. Certain embodiments are therefore directed to a method for transfecting a cell in vivo with one or more nucleic acids, wherein the transfection medium is treated to partially or completely reduce, remove, replace or otherwise inactivate one or more endotoxins and/or nucleases. Other embodiments are directed to a medium that causes minimal degradation of nucleic acids. In one embodiment, the medium contains less than about 1 EU/mL, or less than about 0.1 EU/mL, or less than about 0.01 EU/mL.

[0131] In certain situations, protein-based lipid carriers such as serum albumin can be replaced with non-protein-based lipid carriers such as methyl-beta-cyclodextrin. The medium of the present invention can also be used without a lipid carrier, for example, when transfection is performed using a method that may not require or may not benefit from the presence of a lipid carrier, for example, using one or more lipid-based transfection reagents, polymer-based transfection reagents or peptide-based transfection reagents or using electroporation. Many protein-associated molecules, such as metals, can be highly toxic to cells in vivo. This toxicity can cause decreased viability, as well as the acquisition of mutations. Certain embodiments thus have the additional benefit of producing cells that are free from toxic molecules.

[0132] The associated-molecule component of a protein can be measured by suspending the protein in solution and measuring the conductivity of the solution. Certain embodiments are therefore directed to a medium that contains a protein, wherein about a 10% solution of the protein in water has a conductivity of less than about 500 μmho/cm. In one embodiment, the solution has a conductivity of less than about 50 μmho/cm. In another embodiment, less than about 0.65% of the dry weight of the protein comprises lipids and/or less than about 0.35% of the dry weight of the protein comprises free fatty acids.

[0133] The amount of nucleic acid delivered to cells in vivo can be increased to increase the desired effect of the nucleic acid. However, increasing the amount of nucleic acid delivered to cells in vivo beyond a certain point can cause a decrease in the viability of the cells, due in part to toxicity of the transfection reagent. It has now been discovered that when a nucleic acid is delivered to a population of cells in vivo in a fixed volume (for example, cells in a region of tissue), the amount of nucleic acid delivered to each cell can depend on the total amount of nucleic acid delivered to the population of cells and to the density of the cells, with a higher cell density resulting in less nucleic acid being delivered to each cell. In certain embodiments, a cell in vivo is transfected with one or more nucleic acids more than once. Under certain conditions, for example when the cells are proliferating, the cell density may change from one transfection to the next. Certain embodiments are therefore directed to a method for transfecting a cell in vivo with a nucleic acid, wherein the cell is transfected more than once, and wherein the amount of nucleic acid delivered to the cell is different for two of the transfections. In one embodiment, the cell proliferates between two of the transfections, and the amount of nucleic acid delivered to the cell is greater for the second of the two transfections than for the first of the two transfections. In another embodiment, the cell is transfected more than twice, and the amount of nucleic acid delivered to the cell is greater for the second of three transfections than for the first of the same three transfections, and the amount of nucleic acid delivered to the cells is greater for the third of the same three transfections than for the second of the same three transfections. In yet another embodiment, the cell is transfected more than once, and the maximum amount of nucleic acid delivered to the cell during each transfection is sufficiently low to yield at least about 80% viability for at least two consecutive transfections.

[0134] It has now been discovered that modulating the amount of nucleic acid delivered to a population of proliferating cells in vivo in a series of transfections can result in both an increased effect of the nucleic acid and increased viability of the cells. It has been further discovered that, in certain situations, when cells in vivo are contacted with one or more nucleic acids encoding one or more reprogramming factors in a series of transfections, the efficiency of reprogramming can be increased when the amount of nucleic acid delivered in later transfections is greater than the amount of nucleic acid delivered in earlier transfections, for at least part of the series of transfections. Certain embodiments are therefore directed to a method for reprogramming a cell in vivo, wherein one or more nucleic acids is repeatedly delivered to the cell in a series of transfections, and the amount of the nucleic acid delivered to the cell is greater for at least one later transfection than for at least one earlier transfection. In one embodiment, the cell is transfected between about 2 and about 10 times, or between about 3 and about 8 times, or between about 4 and about 6 times. In another embodiment, the one or more nucleic acids includes at least one RNA molecule, the cell is transfected between about 2 and about 10 times, and the amount of nucleic acid delivered to the cell in each transfection is the same as or greater than the amount of nucleic acid delivered to the cell in the most recent previous transfection. In yet another embodiment, the amount of nucleic acid delivered to the cell in the first transfection is between about 20 ng/cm² and about 250 ng/cm², or between 100 ng/cm² and 600 ng/cm². In yet another embodiment, the cell is transfected about 5 times at intervals of between about 12 and about 48 hours, and the amount of nucleic acid delivered to the cell is about 25 ng/cm² for the first transfection, about 50 ng/cm² for the second transfection, about 100 ng/cm² for the third transfection, about 200 ng/cm² for the fourth transfection, and about 400 ng/cm² for the fifth transfection. In yet another embodiment, the cell is further transfected at least once after the fifth transfection, and the amount of nucleic acid delivered to the cell is about 400 ng/cm².

[0135] Certain embodiments are directed to a method for transfecting a cell in vivo with a nucleic acid, wherein the amount of nucleic acid is determined by measuring the cell density, and choosing the amount of nucleic acid to transfect based on the measurement of cell density. In one embodiment, the cell density is measured by optical means. In another embodiment, the cell is transfected repeatedly, the cell density increases between two transfections, and the amount of nucleic acid transfected is greater for the second of the two transfections than for the first of the two transfections.

[0136] It has now been discovered that, in certain situations, the in vivo transfection efficiency and viability of cells contacted with the medium of the present invention can be improved by conditioning the medium. Certain embodiments are therefore directed to a method for conditioning a medium. Other embodiments are directed to a medium that is conditioned. In one embodiment, the feeders are fibroblasts, and the medium is conditioned for approximately 24 hours. Other embodiments are directed to a method for transfecting a cell in vivo, wherein the transfection medium is conditioned. Other embodiments are directed to a method for reprogramming and/or gene-editing a cell in vivo, wherein the medium is conditioned. In one embodiment, the feeders are mitotically inactivated, for example, by exposure to a chemical such as mitomycin-C or by exposure to gamma radiation. In certain embodiments, it may be beneficial to use only autologous materials, in part to, for example and not wishing to be bound by theory, avoid the risk of disease transmission from the feeders to the cell or the patient. Certain embodiments are therefore directed to a method for transfecting a cell in vivo, wherein the transfection medium is conditioned, and wherein the feeders are derived from the same individual as the cell being transfected. Other embodiments are directed to a method for reprogramming and/or gene-editing a cell in vivo, wherein the medium is conditioned, and wherein the feeders are derived from the same individual as the cell being reprogrammed and/or gene-edited.

[0137] Several molecules can be added to media by conditioning. Certain embodiments are therefore directed to a medium that is supplemented with one or more molecules that are present in a conditioned medium. In one embodiment, the medium is supplemented with Wnt1, Wnt2, Wnt3, Wnt3a or a biologically active fragment, analogue, variant, agonist, or family-member thereof. In another embodiment, the medium is supplemented with TGF-β or a biologically active fragment, analogue, variant, agonist, or family-member thereof. In yet another embodiment, a cell in vivo is reprogrammed according to the method of the present invention, wherein the medium is not supplemented with TGF-β for between about 1 and about 5 days, and is then supplemented with TGF-β for at least about 2 days. In yet another embodiment, the medium is supplemented with IL-6, IL-6R or a biologically active fragment, analogue, variant, agonist, or family-member thereof. In yet another embodiment, the medium is supplemented with a sphingolipid or a fatty acid. In still another embodiment, the sphingolipid is lysophosphatidic acid, lysosphingomyelin, sphingosine-1-phosphate or a biologically active analogue, variant or derivative thereof.

[0138] In addition to mitotically inactivating cells, under certain conditions, irradiation can change the gene expression of cells, causing cells to produce less of certain proteins and more of certain other proteins that non-irradiated cells, for example, members of the Wnt family of proteins. In addition, certain members of the Wnt family of proteins can promote the growth and transformation of cells. It has now been discovered that, in certain situations, the efficiency of reprogramming can be greatly increased by contacting a cell in vivo with a medium that is conditioned using irradiated feeders instead of mitomycin-c-treated feeders. It has been further discovered that the increase in reprogramming efficiency observed when using irradiated feeders is caused in part by Wnt proteins that are secreted by the feeders. Certain embodiments are therefore directed to a method for reprogramming a cell in vivo, wherein the cell is contacted with Wnt1, Wnt2, Wnt3, Wnt3a or a biologically active fragment, analogue, variant, family-member or agonist thereof, including agonists of downstream targets of Wnt proteins, and/or agents that mimic one or more of the biological effects of Wnt proteins, for example, 2-amino-4-[3,4-(methylenedioxy)benzylamino]-6-(3-methoxyphenyl)pyrimidine.

[0139] Because of the low efficiency of many DNA-based reprogramming methods, these methods may be difficult or impossible to use with cells derived from patient samples, which may contain only a small number of cells. In contrast, the high efficiency of certain embodiments of the present invention can allow reliable reprogramming of a small number of cells, including single cells. Certain embodiments are directed to a method for reprogramming a small number of cells. Other embodiments are directed to a method for reprogramming a single cell. In one embodiment, the cell is contacted with one or more enzymes. In another embodiment, the enzyme is collagenase. In yet another embodiment, the collagenase is animal-component free. In one embodiment, the collagenase is present at a concentration of between about 0.1 mg/mL and about 10 mg/mL, or between about 0.5 mg/mL and about 5 mg/mL. In another embodiment, the cell is a blood cell. In yet another embodiment, the cell is contacted with a medium containing one or more proteins that is derived from the patient's blood. In still another embodiment, the cell is contacted with a medium comprising: DMEM/F12+2 mM L-alanyl-L-glutamine+between about 5% and about 25% patient-derived serum, or between about 10% and about 20% patient-derived serum, or about 20% patient-derived serum.

[0140] It has now been discovered that, in certain situations, transfecting cells in vivo with a mixture of RNA encoding Oct4, Sox2, Klf4, and c-Myc using the medium of the present invention can cause the rate of proliferation of the cells to increase. When the amount of RNA delivered to the cells is too low to ensure that all of the cells are transfected, only a fraction of the cells may show an increased proliferation rate. In certain situations, such as when generating a personalized therapeutic, increasing the proliferation rate of cells may be desirable, in part because doing so can reduce the time necessary to generate the therapeutic, and therefore can reduce the cost of the therapeutic. Certain embodiments are therefore directed to a method for transfecting a cell in vivo with a mixture of RNA encoding Oct4, Sox2, Klf4, and c-Myc. In one embodiment, the cell exhibits an increased proliferation rate. In another embodiment, the cell is reprogrammed.

[0141] Many diseases are associated with one or more mutations. Mutations can be corrected by contacting a cell with a nucleic acid that encodes a protein that, either alone or in combination with other molecules, corrects the mutation (an example of gene-editing). Examples of such proteins include: zinc finger nucleases and TALENs. Certain embodiments are therefore directed to a method for transfecting a cell in vivo with a nucleic acid, wherein the nucleic acid encodes a protein that, either alone or in combination with other molecules, creates a single-strand or double-strand break in a DNA molecule. In a one embodiment, the protein is a zinc finger nuclease or a TALEN. In another embodiment, the nucleic acid is an RNA molecule. In yet another embodiment, the single-strand or double-strand break is within about 5,000,000 bases of the transcription start site of a gene selected from the group: CCR5, CXCR4, GAD1, GAD2, CFTR, HBA1, HBA2, HBB, HBD, FANCA, XPA, XPB, XPC, ERCC2, POLH, HTT, DMD, SOD1, APOE, PRNP, BRCA1, and BRCA2 or an analogue, variant or family-member thereof. In yet another embodiment, the cell is transfected with a nucleic acid that acts as a repair template by either causing the insertion of a DNA sequence in the region of the single-strand or double-strand break or by causing the DNA sequence in the region of the single-strand or double-strand break to otherwise change. In yet another embodiment, the cell is reprogrammed, and subsequently, the cell is gene-edited. In yet another embodiment, the cell is gene-edited, and subsequently, the cell is reprogrammed. In yet another embodiment, the gene-editing and reprogramming are performed within about 7 days of each other. In yet another embodiment, the gene-editing and reprogramming occur simultaneously or on the same day. In yet another embodiment, the cell is a skin cell, the skin cell is gene-edited to disrupt the CCR5 gene, the skin cell is reprogrammed to a hematopoietic stem cell, thus producing a therapeutic for HIV/AIDS, and the therapeutic is used to treat a patient with HIV/AIDS. In yet another embodiment, the skin cell is derived from the same patient whom the therapeutic is used to treat.

[0142] Genes that can be edited according to the methods of the present invention to produce therapeutics of the present invention include genes that can be edited to restore normal function, as well as genes that can be edited to reduce or eliminate function. Such genes include, but are not limited to beta globin (HBB), mutations in which can cause sickle cell disease (SCD) and β-thalassemia, breast cancer 1, early onset (BRCA1) and breast cancer 2, early onset (BRCA2), mutations in which can increase susceptibility to breast cancer, C—C chemokine receptor type 5 (CCR5) and C—X—C chemokine receptor type 4 (CXCR4), mutations in which can confer resistance to HIV infection, cystic fibrosis transmembrane conductance regulator (CFTR), mutations in which can cause cystic fibrosis, dystrophin (DMD), mutations in which can cause muscular dystrophy, including Duchenne muscular dystrophy and Becker's muscular dystrophy, glutamate decarboxylase 1 and glutamate decarboxylase 2 (GAD1, GAD2), mutations in which can prevent autoimmune destruction of 3-cells, hemoglobin alpha 1, hemoglobin alpha 2, and hemoglobin delta (HBA1, HBA2, and HBD), mutations in which can cause thalassemia, Huntington (HTT), mutations in which can cause Huntington's disease, superoxide dismutase 1 (SOD1), mutations in which can cause amyotrophic lateral sclerosis (ALS), XPA, XPB, XPC, XPD (ERCC6) and polymerase (DNA directed), eta (POLH), mutations in which can cause xeroderma pigmentosum, leucine-rich repeat kinase 2 (LRRK2), mutations in which can cause Parkinson's disease, and Fanconi anemia, complementation groups A, B, C, D1, D2, E, F, G, I, J, L, M, N, P (FANCA, FANCB, FANCC, FANCD1, FANCD2, FANCE, FANCF, FANCG, FANCI, FANCJ, FANCL, FANCM, FANCN, FANCP), and RAD51 homolog C (S. cerevisiae) (RAD51C), mutations in which can cause Fanconi anemia.

[0143] Certain embodiments are directed to a therapeutic comprising a nucleic acid. In one embodiment, the nucleic acid encodes one or more gene-editing proteins. Other embodiments are directed to a therapeutic comprising one or more cells that are transfected, reprogrammed, and/or gene-edited in vivo according to the methods of the present invention. In one embodiment, a cell is transfected, reprogrammed, and/or gene-edited, and the transfected, reprogrammed, and/or gene-edited cell is introduced into a patient. In another embodiment, the cell is harvested from the same patient into whom the transfected, reprogrammed and/or gene-edited cell is introduced. Examples of diseases that can be treated with therapeutics of the present invention include, but are not limited to Alzheimer's disease, spinal cord injury, amyotrophic lateral sclerosis, cystic fibrosis, heart disease, including ischemic and dilated cardiomyopathy, macular degeneration, Parkinson's disease, Huntington's disease, diabetes, sickle-cell anemia, thalassemia, Fanconi anemia, xeroderma pigmentosum, muscular dystrophy, severe combined immunodeficiency, hereditary sensory neuropathy, cancer, and HIV/AIDS. In certain embodiments, the therapeutic comprises a cosmetic. In one embodiment, a cell is harvested from a patient, the cell is reprogrammed and expanded to a large number of adipose cells to produce a cosmetic, and the cosmetic is introduced into the patient. In still another embodiment, the cosmetic is used for tissue reconstruction.

[0144] While detailed examples are provided herein for the production of specific types of cells and for the production of therapeutics comprising specific types of cells, it is recognized that the methods of the present invention can be used to produce many other types of cells, and to produce therapeutics comprising one or more of many other types of cells, for example, by reprogramming a cell according to the methods of the present invention, and culturing the cell under conditions that mimic one or more aspects of development by providing conditions that resemble the conditions present in the cellular microenvironment during development.

[0145] Certain embodiments are directed to a library of cells with a variety of human leukocyte antigen (HLA) types (“HLA-matched libraries”). An HLA-matched library may be beneficial in part because it can provide for the rapid production and/or distribution of therapeutics without the patient having to wait for a therapeutic to be produced from the patient's cells. Such a library may be particularly beneficial for the production of cosmetics and for the treatment of heart disease and diseases of the blood and/or immune system for which patients may benefit from the immediate availability of a therapeutic or cosmetic.

[0146] Certain non-canonical nucleotides, when incorporated into synthetic RNA molecules, can reduce the toxicity of the synthetic RNA molecules, in part by interfering with binding of proteins that detect exogenous nucleic acids, for example, protein kinase R, Rig-1 and the oligoadenylate synthetase family of proteins. Non-canonical nucleotides that have been reported to reduce the toxicity of synthetic RNA molecules when incorporated therein include: pseudouridine, 5-methyluridine, 2-thiouridine, 5-methylcytidine, N6-methyladenosine, and certain combinations thereof. However, the chemical characteristics of non-canonical nucleotides that can enable them to lower the in vivo toxicity of synthetic RNA molecules have, until this point, remained unknown. Furthermore, incorporation of large amounts of most non-canonical nucleotides, for example, 5-methyluridine, 2-thiouridine, 5-methylcytidine, and N6-methyladenosine, can reduce the efficiency with which synthetic RNA molecules can be translated into protein, limiting the utility of synthetic RNA molecules containing these nucleotides in applications that require protein expression. In addition, while pseudouridine can be completely substituted for uridine in synthetic RNA molecules without reducing the efficiency with which the synthetic RNA molecules can be translated into protein, in certain situations, for example, when performing frequent, repeated transfections, synthetic RNA molecules containing only adenosine, guanosine, cytidine, and pseudouridine can exhibit excessive toxicity.

[0147] It has now been discovered that synthetic RNA molecules containing one or more non-canonical nucleotides that include one or more substitutions at the 2C and/or 4C and/or 5C positions in the case of a pyrimidine or the 6C and/or 7N and/or 8C positions in the case of a purine can be less toxic than synthetic RNA molecules containing only canonical nucleotides, due in part to the ability of substitutions at these positions to interfere with recognition of synthetic RNA molecules by proteins that detect exogenous nucleic acids, and furthermore, that substitutions at these positions can have minimal impact on the efficiency with which the synthetic RNA molecules can be translated into protein, due in part to the lack of interference of substitutions at these positions with base-pairing and base-stacking interactions.

[chemical structure]

[0148] Examples of non-canonical nucleotides that include one or more substitutions at the 2C and/or 4C and/or 5C positions in the case of a pyrimidine or the 6C and/or 7N and/or 8C positions in the case of a purine include, but are not limited to: 2-thiouridine, 5-azauridine, pseudouridine, 4-thiouridine, 5-methyluridine, 5-aminouridine, 5-hydroxyuridine, 5-methyl-5-azauridine, 5-amino-5-azauridine, 5-hydroxy-5-azauridine, 5-methylpseudouridine, 5-aminopseudouridine, 5-hydroxypseudouridine, 4-thio-5-azauridine, 4-thiopseudouridine, 4-thio-5-methyluridine, 4-thio-5-aminouridine, 4-thio-5-hydroxyuridine, 4-thio-5-methyl-5-azauridine, 4-thio-5-amino-5-azauridine, 4-thio-5-hydroxy-5-azauridine, 4-thio-5-methylpseudouridine, 4-thio-5-aminopseudouridine, 4-thio-5-hydroxypseudouridine, 2-thiocytidine, 5-azacytidine, pseudoisocytidine, N4-methylcytidine, N4-aminocytidine, N4-hydroxycytidine, 5-methylcytidine, 5-aminocytidine, 5-hydroxycytidine, 5-methyl-5-azacytidine, 5-amino-5-azacytidine, 5-hydroxy-5-azacytidine, 5-methylpseudoisocytidine, 5-aminopseudoisocytidine, 5-hydroxypseudoisocytidine, N4-methyl-5-azacytidine, N4-methylpseudoisocytidine, 2-thio-5-azacytidine, 2-thiopseudoisocytidine, 2-thio-N4-methylcytidine, 2-thio-N4-aminocytidine, 2-thio-N4-hydroxycytidine, 2-thio-5-methylcytidine, 2-thio-5-aminocytidine, 2-thio-5-hydroxycytidine, 2-thio-5-methyl-5-azacytidine, 2-thio-5-amino-5-azacytidine, 2-thio-5-hydroxy-5-azacytidine, 2-thio-5-methylpseudoisocytidine, 2-thio-5-aminopseudoisocytidine, 2-thio-5-hydroxypseudoisocytidine, 2-thio-N4-methyl-5-azacytidine, 2-thio-N4-methylpseudoisocytidine, N4-methyl-5-methylcytidine, N4-methyl-5-aminocytidine, N4-methyl-5-hydroxycytidine, N4-methyl-5-methyl-5-azacytidine, N4-methyl-5-amino-5-azacytidine, N4-methyl-5-hydroxy-5-azacytidine, N4-methyl-5-methylpseudoisocytidine, N4-methyl-5-aminopseudoisocytidine, N4-methyl-5-hydroxypseudoisocytidine, N4-amino-5-azacytidine, N4-aminopseudoisocytidine, N4-amino-5-methylcytidine, N4-amino-5-aminocytidine, N4-amino-5-hydroxycytidine, N4-amino-5-methyl-5-azacytidine, N4-amino-5-amino-5-azacytidine, N4-amino-5-hydroxy-5-azacytidine, N4-amino-5-methylpseudoisocytidine, N4-amino-5-aminopseudoisocytidine, N4-amino-5-hydroxypseudoisocytidine, N4-hydroxy-5-azacytidine, N4-hydroxypseudoisocytidine, N4-hydroxy-5-methylcytidine, N4-hydroxy-5-aminocytidine, N4-hydroxy-5-hydroxycytidine, N4-hydroxy-5-methyl-5-azacytidine, N4-hydroxy-5-amino-5-azacytidine, N4-hydroxy-5-hydroxy-5-azacytidine, N4-hydroxy-5-methylpseudoisocytidine, N4-hydroxy-5-aminopseudoisocytidine, N4-hydroxy-5-hydroxypseudoisocytidine, 2-thio-N4-methyl-5-methylcytidine, 2-thio-N4-methyl-5-aminocytidine, 2-thio-N4-methyl-5-hydroxycytidine, 2-thio-N4-methyl-5-methyl-5-azacytidine, 2-thio-N4-methyl-5-amino-5-azacytidine, 2-thio-N4-methyl-5-hydroxy-5-azacytidine, 2-thio-N4-methyl-5-methylpseudoisocytidine, 2-thio-N4-methyl-5-aminopseudoisocytidine, 2-thio-N4-methyl-5-hydroxypseudoisocytidine, 2-thio-N4-amino-5-azacytidine, 2-thio-N4-aminopseudoisocytidine, 2-thio-N4-amino-5-methylcytidine, 2-thio-N4-amino-5-aminocytidine, 2-thio-N4-amino-5-hydroxycytidine, 2-thio-N4-amino-5-methyl-5-azacytidine, 2-thio-N4-amino-5-amino-5-azacytidine, 2-thio-N4-amino-5-hydroxy-5-azacytidine, 2-thio-N4-amino-5-methylpseudoisocytidine, 2-thio-N4-amino-5-aminopseudoisocytidine, 2-thio-N4-amino-5-hydroxypseudoisocytidine, 2-thio-N4-hydroxy-5-azacytidine, 2-thio-N4-hydroxypseudoisocytidine, 2-thio-N4-hydroxy-5-methylcytidine, N4-hydroxy-5-aminocytidine, 2-thio-N4-hydroxy-5-hydroxycytidine, 2-thio-N4-hydroxy-5-methyl-5-azacytidine, 2-thio-N4-hydroxy-5-amino-5-azacytidine, 2-thio-N4-hydroxy-5-hydroxy-5-azacytidine, 2-thio-N4-hydroxy-5-methylpseudoisocytidine, 2-thio-N4-hydroxy-5-aminopseudoisocytidine, 2-thio-N4-hydroxy-5-hydroxypseudoisocytidine, N6-methyladenosine, N6-aminoadenosine, N6-hydroxyadenosine, 7-deazaadenosine, 8-azaadenosine, N6-methyl-7-deazaadenosine, N6-methyl-8-azaadenosine, 7-deaza-8-azaadenosine, N6-methyl-7-deaza-8-azaadenosine, N6-amino-7-deazaadenosine, N6-amino-8-azaadenosine, N6-amino-7-deaza-8-azaadenosine, N6-hydroxyadenosine, N6-hydroxy-7-deazaadenosine, N6-hydroxy-8-azaadenosine, N6-hydroxy-7-deaza-8-azaadenosine, 6-thioguanosine, 7-deazaguanosine, 8-azaguanosine, 6-thio-7-deazaguanosine, 6-thio-8-azaguanosine, 7-deaza-8-azaguanosine, and 6-thio-7-deaza-8-azaguanosine. Note that alternative naming schemes exist for certain non-canonical nucleotides. For example, in certain situations, 5-methylpseudouridine can be referred to as “3-methylpseudouridine” or “N3-methylpseudouridine” or “1-methylpseudouridine” or “N1-methylpseudouridine”.

[0149] Nucleotides that contain the prefix “amino” can refer to any nucleotide that contains a nitrogen atom bound to the atom at the stated position of the nucleotide, for example, 5-aminocytidine can refer to 5-aminocytidine, 5-methylaminocytidine, and 5-nitrocytidine. Similarly, nucleotides that contain the prefix “methyl” can refer to any nucleotide that contains a carbon atom bound to the atom at the stated position of the nucleotide, for example, 5-methylcytidine can refer to 5-methylcytidine, 5-ethylcytidine, and 5-hydroxymethylcytidine, nucleotides that contain the prefix “thio” can refer to any nucleotide that contains a sulfur atom bound to the atom at the given position of the nucleotide, and nucleotides that contain the prefix “hydroxy” can refer to any nucleotide that contains an oxygen atom bound to the atom at the given position of the nucleotide, for example, 5-hydroxyuridine can refer to 5-hydroxyuridine and uridine with a methyl group bound to an oxygen atom, wherein the oxygen atom is bound to the atom at the 5C position of the uridine.

[0150] Certain embodiments are therefore directed to a synthetic RNA molecule, wherein the synthetic RNA molecule contains one or more nucleotides that includes one or more substitutions at the 2C and/or 4C and/or 5C positions in the case of a pyrimidine or the 6C and/or 7N and/or 8C positions in the case of a purine. Other embodiments are directed to a therapeutic, wherein the therapeutic contains one or more synthetic RNA molecules, and wherein the one or more synthetic RNA molecules contains one or more nucleotides that includes one or more substitutions at the 2C and/or 4C and/or 5C positions in the case of a pyrimidine or the 6C and/or 7N and/or 8C positions in the case of a purine. In one embodiment, the therapeutic comprises a transfection reagent. In another embodiment, the transfection reagent comprises a cationic lipid, liposome or micelle. In still another embodiment, the liposome or micelle comprises folate and the therapeutic composition has anti-cancer activity. In another embodiment, the one or more nucleotides includes at least one of pseudouridine, 2-thiouridine, 4-thiouridine, 5-azauridine, 5-hydroxyuridine, 5-methyluridine, 5-aminouridine, 2-thiopseudouridine, 4-thiopseudouridine, 5-hydroxypseudouridine, 5-methylpseudouridine, 5-aminopseudouridine, pseudoisocytidine, N4-methylcytidine, 2-thiocytidine, 5-azacytidine, 5-hydroxycytidine, 5-aminocytidine, 5-methylcytidine, N4-methylpseudoisocytidine, 2-thiopseudoisocytidine, 5-hydroxypseudoisocytidine, 5-aminopseudoisocytidine, 5-methylpseudoisocytidine, 7-deazaadenosine, 7-deazaguanosine, 6-thioguanosine, and 6-thio-7-deazaguanosine. In another embodiment, the one or more nucleotides includes at least one of pseudouridine, 2-thiouridine, 4-thiouridine, 5-azauridine, 5-hydroxyuridine, 5-methyluridine, 5-aminouridine, 2-thiopseudouridine, 4-thiopseudouridine, 5-hydroxypseudouridine, 5-methylpseudouridine, and 5-aminopseudouridine and at least one of pseudoisocytidine, N4-methylcytidine, 2-thiocytidine, 5-azacytidine, 5-hydroxycytidine, 5-aminocytidine, 5-methylcytidine, N4-methylpseudoisocytidine, 2-thiopseudoisocytidine, 5-hydroxypseudoisocytidine, 5-aminopseudoisocytidine, and 5-methylpseudoisocytidine. In still another embodiment, the one or more nucleotides include at least one of pseudouridine, 2-thiouridine, 4-thiouridine, 5-azauridine, 5-hydroxyuridine, 5-methyluridine, 5-aminouridine, 2-thiopseudouridine, 4-thiopseudouridine, 5-hydroxypseudouridine, and 5-methylpseudouridine, 5-aminopseudouridine and at least one of pseudoisocytidine, N4-methylcytidine, 2-thiocytidine, 5-azacytidine, 5-hydroxycytidine, 5-aminocytidine, 5-methylcytidine, N4-methylpseudoisocytidine, 2-thiopseudoisocytidine, 5-hydroxypseudoisocytidine, 5-aminopseudoisocytidine, and 5-methylpseudoisocytidine and at least one of 7-deazaguanosine, 6-thioguanosine, and 6-thio-7-deazaguanosine. In yet another embodiment, the one or more nucleotides includes: 5-methylcytidine and 7-deazaguanosine. In another embodiment, the one or more nucleotides also includes pseudouridine or 4-thiouridine or 5-methyluridine or 5-aminouridine or 4-thiopseudouridine or 5-methylpseudouridine or 5-aminopseudouridine. In a still another embodiment, the one or more nucleotides also includes 7-deazaadenosine. In another embodiment, the one or more nucleotides includes: pseudoisocytidine and 7-deazaguanosine and 4-thiouridine. In yet another embodiment, the one or more nucleotides includes: pseudoisocytidine or 7-deazaguanosine and pseudouridine. In still another embodiment, the one or more nucleotides includes: 5-methyluridine and 5-methylcytidine and 7-deazaguanosine. In a further embodiment, the one or more nucleotides includes: pseudouridine or 5-methylpseudouridine and 5-methylcytidine and 7-deazaguanosine. In another embodiment, the one or more nucleotides includes: pseudoisocytidine and 7-deazaguanosine and pseudouridine. In one embodiment, the synthetic RNA molecule is present in vivo.

[0151] Certain non-canonical nucleotides can be incorporated more efficiently than other non-canonical nucleotides into synthetic RNA molecules by RNA polymerases that are commonly used for in vitro transcription, due in part to the tendency of these certain non-canonical nucleotides to participate in standard base-pairing interactions and base-stacking interactions, and to interact with the RNA polymerase in a manner similar to that in which the corresponding canonical nucleotide interacts with the RNA polymerase. As a result, certain nucleotide mixtures containing one or more non-canonical nucleotides can be beneficial in part because in vitro-transcription reactions containing these nucleotide mixtures can yield a large quantity of synthetic RNA. Certain embodiments are therefore directed to a nucleotide mixture containing one or more nucleotides that includes one or more substitutions at the 2C and/or 4C and/or 5C positions in the case of a pyrimidine or the 6C and/or 7N and/or 8C positions in the case of a purine. Nucleotide mixtures include, but are not limited to (numbers preceding each nucleotide indicate an exemplary fraction of the non-canonical nucleotide triphosphate in an in vitro-transcription reaction, for example, 0.2 pseudoisocytidine refers to a reaction containing adenosine-5-triphosphate, guanosine-5-triphosphate, uridine-5-triphosphate, cytidine-5′-triphosphate, and pseudoisocytidine-5-triphosphate, wherein pseudoisocytidine-5′-triphosphate is present in the reaction at an amount approximately equal to 0.2 times the total amount of pseudoisocytidine-5′-triphosphate+cytidine-5-triphosphate that is present in the reaction, with amounts measured either on a molar or mass basis, and wherein more than one number preceding a nucleoside indicates a range of exemplary fractions): 1.0 pseudouridine, 0.1-0.8 2-thiouridine, 0.1-0.8 5-methyluridine, 0.2-1.0 5-hydroxyuridine, 0.1-1.0 5-aminouridine, 0.1-1.0 4-thiouridine, 0.1-1.0 2-thiopseudouridine, 0.1-1.0 4-thiopseudouridine, 0.1-1.0 5-hydroxypseudouridine, 0.2-1 5-methylpseudouridine, 0.1-1.0 5-aminopseudouridine, 0.2-1.0 2-thiocytidine, 0.1-0.8 pseudoisocytidine, 0.2-1.0 5-methylcytidine, 0.2-1.0 5-hydroxycytidine, 0.1-1.0 5-aminocytidine, 0.2-1.0 N4-methylcytidine, 0.2-1.0 5-methylpseudoisocytidine, 0.2-1.0 5-hydroxypseudoisocytidine, 0.2-1.0 5-aminopseudoisocytidine, 0.2-1.0 N4-methylpseudoisocytidine, 0.2-1.0 2-thiopseudoisocytidine, 0.2-1.0 7-deazaguanosine, 0.2-1.0 6-thioguanosine, 0.2-1.0 6-thio-7-deazaguanosine, 0.2-1.0 8-azaguanosine, 0.2-1.0 7-deaza-8-azaguanosine, 0.2-1.0 6-thio-8-azaguanosine, 0.1-0.5 7-deazaadenosine, and 0.1-0.5 N6-methyladenosine.

[0152] In various embodiments, the synthetic RNA composition or synthetic polynucleotide composition (e.g., which may be prepared by in vitro transcription) contains substantially or entirely the canonical nucleotide at positions having adenine or “A” in the genetic code. The term “substantially” in this context refers to at least 90%. In these embodiments, the synthetic RNA composition or synthetic polynucleotide composition may further contain (e.g., consist of) 7-deazaguanosine at positions with “G” in the genetic code as well as the corresponding canonical nucleotide “G”, and the canonical and non-canonical nucleotide at positions with G may be in the range of 5:1 to 1:5, or in some embodiments in the range of 2:1 to 1:2. In these embodiments, the synthetic RNA composition or synthetic polynucleotide composition may further contain (e.g., consist of) one or more (e.g., two, three or four) of 5-hydroxymethylcytidine, 5-hydroxycytidine, 5-carboxycytidine, and 5-formylcytidine at positions with “C” in the genetic code as well as the canonical nucleotide “C”, and the canonical and non-canonical nucleotide at positions with C may be in the range of 5:1 to 1:5, or in some embodiments in the range of 2:1 to 1:2. In some embodiments, the level of non-canonical nucleotide at positions of “C” are as described in the preceding paragraph. In these embodiments, the synthetic RNA composition or synthetic polynucleotide composition may further contain (e.g., consist of) one or more (e.g., two, three, or four) of 5-hydroxymethyluridine, 5-hydroxyuridine, 5-carboxyurdine, and 5-formyluridine at positions with “U” in the genetic code as well as the canonical nucleotide “U”, and the canonical and non-canonical nucleotide at positions with “U” may be in the range of 5:1 to 1:5, or in some embodiments in the range of 2:1 to 1:2. In some embodiments, the level of non-canonical nucleotide at positions of “U” are as described in the preceding paragraph.

[0153] It has now been discovered that combining certain non-canonical nucleotides can be beneficial in part because the contribution of non-canonical nucleotides to lowering the toxicity of synthetic RNA molecules can be additive. Certain embodiments are therefore directed to a nucleotide mixture, wherein the nucleotide mixture contains more than one of the non-canonical nucleotides listed above, for example, the nucleotide mixture contains both pseudoisocytidine and 7-deazaguanosine or the nucleotide mixture contains both N4-methylcytidine and 7-deazaguanosine, etc. In one embodiment, the nucleotide mixture contains more than one of the non-canonical nucleotides listed above, and each of the non-canonical nucleotides is present in the mixture at the fraction listed above, for example, the nucleotide mixture contains 0.1-0.8 pseudoisocytidine and 0.2-1.0 7-deazaguanosine or the nucleotide mixture contains 0.2-1.0 N4-methylcytidine and 0.2-1.0 7-deazaguanosine, etc.

[0154] In certain situations, for example, when it may not be necessary or desirable to maximize the yield of an in vitro-transcription reaction, nucleotide fractions other than those given above may be used. The exemplary fractions and ranges of fractions listed above relate to nucleotide-triphosphate solutions of typical purity (greater than 90% purity). Larger fractions of these and other nucleotides can be used by using nucleotide-triphosphate solutions of greater purity, for example, greater than about 95% purity or greater than about 98% purity or greater than about 99% purity or greater than about 99.5% purity, which can be achieved, for example, by purifying the nucleotide triphosphate solution using existing chemical-purification technologies such as high-pressure liquid chromatography (HPLC) or by other means. In one embodiment, nucleotides with multiple isomers are purified to enrich the desired isomer.

[0155] Other embodiments are directed to a method for inducing a cell in vivo to express a protein of interest by contacting the cell with a synthetic RNA molecule that contains one or more non-canonical nucleotides that includes one or more substitutions at the 2C and/or 4C and/or 5C positions in the case of a pyrimidine or the 6C and/or 7N and/or 8C positions in the case of a purine. Still other embodiments are directed to a method for transfecting, reprogramming, and/or gene-editing a cell in vivo by contacting the cell with a synthetic RNA molecule that contains one or more non-canonical nucleotides that includes one or more substitutions at the 2C and/or 4C and/or 5C positions in the case of a pyrimidine or the 6C and/or 7N and/or 8C positions in the case of a purine. In one embodiment, the synthetic RNA molecule is produced by in vitro transcription. In one embodiment, the synthetic RNA molecule encodes one or more reprogramming factors. In another embodiment, the one or more reprogramming factors includes Oct4 protein. In another embodiment, the cell is also contacted with a synthetic RNA molecule that encodes Sox2 protein. In yet another embodiment, the cell is also contacted with a synthetic RNA molecule that encodes Klf4 protein. In yet another embodiment, the cell is also contacted with a synthetic RNA molecule that encodes c-Myc protein. In yet another embodiment, the cell is also contacted with a synthetic RNA molecule that encodes Lin28 protein.

[0156] Enzymes such as T7 RNA polymerase may preferentially incorporate canonical nucleotides in an in vitro-transcription reaction containing both canonical and non-canonical nucleotides. As a result, an in vitro-transcription reaction containing a certain fraction of a non-canonical nucleotide may yield RNA containing a different, often lower, fraction of the non-canonical nucleotide than the fraction at which the non-canonical nucleotide was present in the reaction. In certain embodiments, references to nucleotide incorporation fractions (for example, “a synthetic RNA molecule containing 50% pseudoisocytidine” or “0.1-0.8 pseudoisocytidine”) therefore can refer both to RNA molecules containing the stated fraction of the nucleotide, and to RNA molecules synthesized in a reaction containing the stated fraction of the nucleotide (or nucleotide derivative, for example, nucleotide-triphosphate), even though such a reaction may yield RNA containing a different fraction of the nucleotide than the fraction at which the non-canonical nucleotide was present in the reaction.

[0157] Different nucleotide sequences can encode the same protein by utilizing alternative codons. In certain embodiments, references to nucleotide incorporation fractions therefore can refer both to RNA molecules containing the stated fraction of the nucleotide, and to RNA molecules encoding the same protein as a different RNA molecule, wherein the different RNA molecule contains the stated fraction of the nucleotide.

[0158] Certain embodiments are directed to a kit containing one or more materials needed to practice the present invention. In one embodiment, the kit contains one or more synthetic RNA molecules. In one embodiment, the kit contains one or more synthetic RNA molecules that encode one or more reprogramming factors and/or gene-editing proteins. In another embodiment, the one or more synthetic RNA molecules contain one or more non-canonical nucleotides that include one or more substitutions at the 2C and/or 4C and/or 5C positions in the case of a pyrimidine or the 6C and/or 7N and/or 8C positions in the case of a purine. In another embodiment, the kit contains one or more of: a transfection medium, a transfection reagent, a complexation medium, and a matrix solution. In one embodiment, the matrix solution contains fibronectin and/or vitronectin or recombinant fibronectin and/or recombinant vitronectin. In one embodiment, one or more of the components of the kit are present as a plurality of aliquots. In one embodiment, the kit contains aliquots of nucleic acid transfection-reagent complexes. In another embodiment, the kit contains aliquots of nucleic acid transfection-reagent complexes that are provided in a solid form, for example, as frozen or freeze-dried pellets. In yet another embodiment, the kit contains aliquots of medium, wherein each aliquot contains transfection reagent-nucleic acid complexes that are stabilized either by chemical treatment or by freezing.

[0159] Transfection, in general, and reprogramming, in particular, can be difficult and time-consuming techniques that can be repetitive and prone to error. However, these techniques are often performed manually due to the lack of automated transfection equipment. Certain embodiments are therefore directed to a system that can transfect, reprogram, and/or gene-edit cells in vivo in an automated or semi-automated manner.

[0160] It has now been discovered that the non-canonical nucleotide members of the 5-methylcytidine de-methylation pathway, when incorporated into synthetic RNA, can increase the efficiency with which the synthetic RNA can be translated into protein in vivo, and can decrease the toxicity of the synthetic RNA in vivo. These non-canonical nucleotides include, for example: 5-methylcytidine, 5-hydroxymethylcytidine, 5-formylcytidine, and 5-carboxycytidine (a.k.a. “cytidine-5-carboxylic acid”). Certain embodiments are therefore directed to a nucleic acid. In some embodiments, the nucleic acid is present in vivo. In one embodiment, the nucleic acid is a synthetic RNA molecule. In another embodiment, the nucleic acid comprises one or more non-canonical nucleotides. In one embodiment, the nucleic acid comprises one or more non-canonical nucleotide members of the 5-methylcytidine de-methylation pathway. In another embodiment, the nucleic acid comprises at least one of: 5-methylcytidine, 5-hydroxymethylcytidine, 5-formylcytidine, and 5-carboxycytidine or a derivative thereof. In a further embodiment, the nucleic acid comprises at least one of: pseudouridine, 5-methylpseudouridine, 5-hydroxyuridine, 5-methyluridine, 5-methylcytidine, 5-hydroxymethylcytidine, N4-methylcytidine, N4-acetylcytidine, and 7-deazaguanosine or a derivative thereof.

### 5-methylcytidine De-Methylation Pathway

[chemical structure]

[0162] Certain embodiments are directed to a protein. Other embodiments are directed to a nucleic acid that encodes a protein. In one embodiment, the protein is a protein of interest. In another embodiment, the protein is selected from: a reprogramming protein and a gene-editing protein. In one embodiment, the nucleic acid is a plasmid. In another embodiment, the nucleic acid is present in a virus or viral vector. In a further embodiment, the virus or viral vector is replication incompetent. In a still further embodiment, the virus or viral vector is replication competent. In one embodiment, the virus or viral vector includes at least one of: an adenovirus, a retrovirus, a lentivirus, a herpes virus, an adeno-associated virus or a natural or engineered variant thereof, and an engineered virus.

[0163] It has also been discovered that certain combinations of non-canonical nucleotides can be particularly effective at increasing the efficiency with which synthetic RNA can be translated into protein in vivo, and decreasing the toxicity of synthetic RNA in vivo, for example, the combinations: 5-methyluridine and 5-methylcytidine, 5-hydroxyuridine and 5-methylcytidine, 5-hydroxyuridine and 5-hydroxymethylcytidine, 5-methyluridine and 7-deazaguanosine, 5-methylcytidine and 7-deazaguanosine, 5-methyluridine, 5-methylcytidine, and 7-deazaguanosine, and 5-methyluridine, 5-hydroxymethylcytidine, and 7-deazaguanosine. Certain embodiments are therefore directed to a nucleic acid comprising at least two of: 5-methyluridine, 5-methylcytidine, 5-hydroxymethylcytidine, and 7-deazaguanosine or one or more derivatives thereof. Other embodiments are directed to a nucleic acid comprising at least three of: 5-methyluridine, 5-methylcytidine, 5-hydroxymethylcytidine, and 7-deazaguanosine or one or more derivatives thereof. Other embodiments are directed to a nucleic acid comprising all of: 5-methyluridine, 5-methylcytidine, 5-hydroxymethylcytidine, and 7-deazaguanosine or one or more derivatives thereof. In one embodiment, the nucleic acid comprises one or more 5-methyluridine residues, one or more 5-methylcytidine residues, and one or more 7-deazaguanosine residues or one or more 5-methyluridine residues, one or more 5-hydroxymethylcytidine residues, and one or more 7-deazaguanosine residues.

[0164] It has been further discovered that synthetic RNA molecules containing certain fractions of certain non-canonical nucleotides and combinations thereof can exhibit particularly high translation efficiency and low toxicity in vivo. Certain embodiments are therefore directed to a nucleic acid comprising at least one of: one or more uridine residues, one or more cytidine residues, and one or more guanosine residues, and comprising one or more non-canonical nucleotides. In one embodiment, between about 20% and about 80% of the uridine residues are 5-methyluridine residues. In another embodiment, between about 30% and about 50% of the uridine residues are 5-methyluridine residues. In a further embodiment, about 40% of the uridine residues are 5-methyluridine residues. In one embodiment, between about 60% and about 80% of the cytidine residues are 5-methylcytidine residues. In another embodiment, between about 80% and about 100% of the cytidine residues are 5-methylcytidine residues. In a further embodiment, about 100% of the cytidine residues are 5-methylcytidine residues. In a still further embodiment, between about 20% and about 100% of the cytidine residues are 5-hydroxymethylcytidine residues. In one embodiment, between about 20% and about 80% of the guanosine residues are 7-deazaguanosine residues. In another embodiment, between about 40% and about 60% of the guanosine residues are 7-deazaguanosine residues. In a further embodiment, about 50% of the guanosine residues are 7-deazaguanosine residues. In one embodiment, between about 20% and about 80% or between about 30% and about 60% or about 40% of the cytidine residues are N4-methylcytidine and/or N4-acetylcytidine residues. In another embodiment, each cytidine residue is a 5-methylcytidine residue. In a further embodiment, about 100% of the cytidine residues are 5-methylcytidine residues and/or 5-hydroxymethylcytidine residues and/or N4-methylcytidine residues and/or N4-acetylcytidine residues and/or one or more derivatives thereof. In a still further embodiment, about 40% of the uridine residues are 5-methyluridine residues, between about 20% and about 100% of the cytidine residues are N4-methylcytidine and/or N4-acetylcytidine residues, and about 50% of the guanosine residues are 7-deazaguanosine residues. In one embodiment, about 40% of the uridine residues are 5-methyluridine residues and about 100% of the cytidine residues are 5-methylcytidine residues. In another embodiment, about 40% of the uridine residues are 5-methyluridine residues and about 50% of the guanosine residues are 7-deazaguanosine residues. In a further embodiment, about 100% of the cytidine residues are 5-methylcytidine residues and about 50% of the guanosine residues are 7-deazaguanosine residues. In a further embodiment, about 100% of the uridine residues are 5-hydroxyuridine residues. In one embodiment, about 40% of the uridine residues are 5-methyluridine residues, about 100% of the cytidine residues are 5-methylcytidine residues, and about 50% of the guanosine residues are 7-deazaguanosine residues. In another embodiment, about 40% of the uridine residues are 5-methyluridine residues, between about 20% and about 100% of the cytidine residues are 5-hydroxymethylcytidine residues, and about 50% of the guanosine residues are 7-deazaguanosine residues. In some embodiments, less than 100% of the cytidine residues are 5-methylcytidine residues. In other embodiments, less than 100% of the cytidine residues are 5-hydroxymethylcytidine residues. In one embodiment, each uridine residue in the synthetic RNA molecule is a pseudouridine residue or a 5-methylpseudouridine residue. In another embodiment, about 100% of the uridine residues are pseudouridine residues and/or 5-methylpseudouridine residues. In a further embodiment, about 100% of the uridine residues are pseudouridine residues and/or 5-methylpseudouridine residues, about 100% of the cytidine residues are 5-methylcytidine residues, and about 50% of the guanosine residues are 7-deazaguanosine residues.

[0165] Other non-canonical nucleotides that can be used in place of or in combination with 5-methyluridine include, but are not limited to: pseudouridine, 5-hydroxyuridine, and 5-methylpseudouridine (a.k.a. “1-methylpseudouridine”, a.k.a. “N1-methylpseudouridine”) or one or more derivatives thereof. Other non-canonical nucleotides that can be used in place of or in combination with 5-methylcytidine and/or 5-hydroxymethylcytidine include, but are not limited to: pseudoisocytidine, 5-methylpseudoisocytidine, 5-hydroxymethylcytidine, 5-formylcytidine, 5-carboxycytidine, N4-methylcytidine, N4-acetylcytidine or one or more derivatives thereof. In certain embodiments, for example, when performing only a single transfection, injection or delivery or when the cells, tissue, organ or patient being transfected, injected or delivered to are not particularly sensitive to transfection-associated toxicity or innate-immune signaling, the fractions of non-canonical nucleotides can be reduced. Reducing the fraction of non-canonical nucleotides can be beneficial, in part, because reducing the fraction of non-canonical nucleotides can reduce the cost of the nucleic acid. In certain situations, for example, when minimal immunogenicity of the nucleic acid is desired, the fractions of non-canonical nucleotides can be increased.

[0166] Enzymes such as T7 RNA polymerase may preferentially incorporate canonical nucleotides in an in vitro-transcription reaction containing both canonical and non-canonical nucleotides. As a result, an in vitro-transcription reaction containing a certain fraction of a non-canonical nucleotide may yield RNA containing a different, often lower, fraction of the non-canonical nucleotide than the fraction at which the non-canonical nucleotide was present in the reaction. In certain embodiments, references to nucleotide incorporation fractions (for example, “50% 5-methyluridine”) therefore can refer both to nucleic acids containing the stated fraction of the nucleotide, and to nucleic acids synthesized in a reaction containing the stated fraction of the nucleotide (or nucleotide derivative, for example, nucleotide-triphosphate), even though such a reaction may yield a nucleic acid containing a different fraction of the nucleotide than the fraction at which the non-canonical nucleotide was present in the reaction. In addition, different nucleotide sequences can encode the same protein by utilizing alternative codons. In certain embodiments, references to nucleotide incorporation fractions therefore can refer both to nucleic acids containing the stated fraction of the nucleotide, and to nucleic acids encoding the same protein as a different nucleic acid, wherein the different nucleic acid contains the stated fraction of the nucleotide.

[0167] The DNA sequence of a cell can be altered by contacting the cell with a gene-editing protein or by inducing the cell to express a gene-editing protein. However, previously disclosed gene-editing proteins suffer from low binding efficiency and excessive off-target activity, which can introduce undesired mutations in the DNA of the cell, severely limiting their use in vivo, for example in therapeutic and cosmetic applications, in which the introduction of undesired mutations in a patient's cells could lead to the development of cancer. It has now been discovered that gene-editing proteins that comprise the Stsl endonuclease cleavage domain (SEQ ID NO: 1) can exhibit substantially lower off-target activity in vivo than previously disclosed gene-editing proteins, while maintaining a high level of on-target activity in vivo. Other novel engineered proteins have also been discovered that can exhibit high on-target activity in vivo, low off-target activity in vivo, small size, solubility, and other desirable characteristics when they are used as the nuclease domain of a gene-editing protein: Stsl-HA (SEQ ID NO: 2), Stsl-HA2 (SEQ ID NO: 3), Stsl-UHA (SEQ ID NO: 4), Stsl-UHA2 (SEQ ID NO: 5), Stsl-HF (SEQ ID NO: 6), and Stsl-UHF (SEQ ID NO: 7). Stsl-HA, Stsl-HA2 (high activity), Stsl-UHA, and Stsl-UHA2 (ultra-high activity) can exhibit higher on-target activity in vivo than both wild-type Stsl and wild-type Fokl, due in part to specific amino-acid substitutions within the N-terminal region at the 34 and 61 positions, while Stsl-HF (high fidelity) and Stsl-UHF (ultra-high fidelity) can exhibit lower off-target activity in vivo than both wild-type Stsl and wild-type Fokl, due in part to specific amino-acid substitutions within the C-terminal region at the 141 and 152 positions.

[0168] Certain embodiments are therefore directed to a protein. In some embodiments, the protein is present in vivo. In other embodiments, the protein comprises a nuclease domain. In one embodiment, the nuclease domain comprises one or more of: the cleavage domain of Fokl endonuclease (SEQ ID NO: 53), the cleavage domain of Stsl endonuclease (SEQ ID NO: 1), Stsl-HA (SEQ ID NO: 2), Stsl-HA2 (SEQ ID NO: 3), Stsl-UHA (SEQ ID NO: 4), Stsl-UHA2 (SEQ ID NO: 5), Stsl-HF (SEQ ID NO: 6), and Stsl-UHF (SEQ ID NO: 7) or a biologically active fragment or variant thereof.

[0169] It has also been discovered that engineered gene-editing proteins that comprise DNA-binding domains comprising certain novel repeat sequences can exhibit lower off-target activity in vivo than previously disclosed gene-editing proteins, while maintaining a high level of on-target activity in vivo. Certain of these engineered gene-editing proteins can provide several advantages over previously disclosed gene-editing proteins, including, for example, increased flexibility of the linker region connecting repeat sequences, which can result in increased binding efficiency. Certain embodiments are therefore directed to a protein comprising a plurality of repeat sequences. In one embodiment, at least one of the repeat sequences contains the amino-acid sequence: GabG, where “a” and “b” each represent any amino acid. In one embodiment, the protein is a gene-editing protein. In another embodiment, one or more of the repeat sequences are present in a DNA-binding domain. In a further embodiment, “a” and “b” are each independently selected from the group: H and G. In a still further embodiment, “a” and “b” are H and G, respectively. In one embodiment, the amino-acid sequence is present within about 5 amino acids of the C-terminus of the repeat sequence. In another embodiment, the amino-acid sequence is present at the C-terminus of the repeat sequence. In some embodiments, one or more G in the amino-acid sequence GabG is replaced with one or more amino acids other than G, for example A, H or GG. In one embodiment, the repeat sequence has a length of between about 32 and about 40 amino acids or between about 33 and about 39 amino acids or between about 34 and 38 amino acids or between about 35 and about 37 amino acids or about 36 amino acids or greater than about 32 amino acids or greater than about 33 amino acids or greater than about 34 amino acids or greater than about 35 amino acids. Other embodiments are directed to a protein comprising one or more transcription activator-like effector domains. In one embodiment, at least one of the transcription activator-like effector domains comprises a repeat sequence. Other embodiments are directed to a protein comprising a plurality of repeat sequences generated by inserting one or more amino acids between at least two of the repeat sequences of a transcription activator-like effector domain. In one embodiment, one or more amino acids is inserted about 1 or about 2 or about 3 or about 4 or about 5 amino acids from the C-terminus of at least one repeat sequence. Still other embodiments are directed to a protein comprising a plurality of repeat sequences, wherein about every other repeat sequence has a different length than the repeat sequence immediately preceding or following the repeat sequence. In one embodiment, every other repeat sequence is about 36 amino acids long. In another embodiment, every other repeat sequence is 36 amino acids long. Still other embodiments are directed to a protein comprising a plurality of repeat sequences, wherein the plurality of repeat sequences comprises at least two repeat sequences that are each at least 36 amino acids long, and wherein at least two of the repeat sequences that are at least 36 amino acids long are separated by at least one repeat sequence that is less than 36 amino acids long. Some embodiments are directed to a protein that comprises one or more sequences selected from, for example, SEQ ID NO: 54, SEQ ID NO: 55, SEQ ID NO: 56, SEQ ID NO: 57, SEQ ID NO: 58, SEQ ID NO: 59, and SEQ ID NO: 60.

[0170] Other embodiments are directed to a protein that comprises a DNA-binding domain. In some embodiments, the DNA-binding domain comprises a plurality of repeat sequences. In one embodiment, the plurality of repeat sequences enables high-specificity recognition of a binding site in a target DNA molecule. In another embodiment, at least two of the repeat sequences have at least about 50%, or about 60%, or about 70%, or about 80%, or about 90%, or about 95%, or about 98%, or about 99% homology to each other. In a further embodiment, at least one of the repeat sequences comprises one or more regions capable of binding to a binding site in a target DNA molecule. In a still further embodiment, the binding site comprises a defined sequence of between about 1 to about 5 bases in length. In one embodiment, the DNA-binding domain comprises a zinc finger. In another embodiment, the DNA-binding domain comprises a transcription activator-like effector (TALE). In a further embodiment, the plurality of repeat sequences includes at least one repeat sequence having at least about 50% or about 60% or about 70% or about 80% or about 90% or about 95% or about 98%, or about 99% homology to a TALE. In a still further embodiment, the gene-editing protein comprises a clustered regularly interspaced short palindromic repeat (CRISPR)-associated protein. In one embodiment, the gene-editing protein comprises a nuclear-localization sequence. In another embodiment, the nuclear-localization sequence comprises the amino-acid sequence: PKKKRKV. In one embodiment, the gene-editing protein comprises a mitochondrial-localization sequence. In another embodiment, the mitochondrial-localization sequence comprises the amino-acid sequence: LGRVIPRKIASRASLM. In one embodiment, the gene-editing protein comprises a linker. In another embodiment, the linker connects a DNA-binding domain to a nuclease domain. In a further embodiment, the linker is between about 1 and about 10 amino acids long. In some embodiments, the linker is about 1, about 2, or about 3, or about 4, or about 5, or about 6, or about 7, or about 8, or about 9, or about 10 amino acids long. In one embodiment, the gene-editing protein is capable of generating a nick or a double-strand break in a target DNA molecule.

[0171] Certain embodiments are directed to a method for modifying the genome of a cell in vivo, the method comprising introducing into a cell in vivo a nucleic acid molecule encoding a non-naturally occurring fusion protein comprising an artificial transcription activator-like (TAL) effector repeat domain comprising one or more repeat units 36 amino acids in length and an endonuclease domain, wherein the repeat domain is engineered for recognition of a predetermined nucleotide sequence, and wherein the fusion protein recognizes the predetermined nucleotide sequence. In one embodiment, the cell is a eukaryotic cell. In another embodiment, the cell is an animal cell. In a further embodiment, the cell is a mammalian cell. In a still further embodiment, the cell is a human cell. In one embodiment, the cell is a plant cell. In another embodiment, the cell is a prokaryotic cell. In some embodiments, the fusion protein introduces an endonucleolytic cleavage in a nucleic acid of the cell, whereby the genome of the cell is modified.

[0172] Certain embodiments are directed to a composition for altering the DNA sequence of a cell in vivo comprising a nucleic acid, wherein the nucleic acid encodes a gene-editing protein. Other embodiments are directed to a composition for altering the DNA sequence of a cell in vivo comprising a nucleic-acid mixture, wherein the nucleic-acid mixture comprises: a first nucleic acid that encodes a first gene-editing protein, and a second nucleic acid that encodes a second gene-editing protein. In one embodiment, the binding site of the first gene-editing protein and the binding site of the second gene-editing protein are present in the same target DNA molecule. In another embodiment, the binding site of the first gene-editing protein and the binding site of the second gene-editing protein are separated by less than about 50 bases, or less than about 40 bases, or less than about 30 bases or less than about 20 bases, or less than about 10 bases, or between about 10 bases and about 25 bases or about 15 bases. In one embodiment, the nuclease domain of the first gene-editing protein and the nuclease domain of the second gene-editing protein are capable of forming a dimer. In another embodiment, the dimer is capable of generating a nick or double-strand break in a target DNA molecule.

[0173] Certain embodiments are directed to a therapeutic composition. Other embodiments are directed to a cosmetic composition. In some embodiments, the composition comprises a repair template. In a further embodiment, the repair template is a single-stranded DNA molecule or a double-stranded DNA molecule.

[0174] Other embodiments are directed to an article of manufacture for synthesizing a protein or a nucleic acid encoding a protein. In one embodiment, the article is a nucleic acid. In another embodiment, the protein comprises a DNA-binding domain. In a further embodiment, the nucleic acid comprises a nucleotide sequence encoding a DNA-binding domain. In one embodiment, the protein comprises a nuclease domain. In another embodiment, the nucleic acid comprises a nucleotide sequence encoding a nuclease domain. In one embodiment, the protein comprises a plurality of repeat sequences. In another embodiment, the nucleic acid encodes a plurality of repeat sequences. In a further embodiment, the nuclease domain is selected from: Fokl, Stsl, Stsl-HA, Stsl-HA2, Stsl-UHA, Stsl-UHA2, Stsl-HF, and Stsl-UHF or a natural or engineered variant or biologically active fragment thereof. In one embodiment, the nucleic acid comprises an RNA-polymerase promoter. In another embodiment, the RNA-polymerase promoter is a T7 promoter or a SP6 promoter. In a further embodiment, the nucleic acid comprises a viral promoter. In one embodiment, the nucleic acid comprises an untranslated region. In another embodiment, the nucleic acid is an in vitro-transcription template.

[0175] Certain embodiments are directed to a method for inducing a cell to express a protein in vivo. Other embodiments are directed to a method for altering the DNA sequence of a cell in vivo comprising transfecting the cell in vivo with a gene-editing protein or inducing the cell to express a gene-editing protein in vivo. Still other embodiments are directed to a method for reducing the expression of a protein of interest in a cell in vivo. In one embodiment, the cell is induced to express a gene-editing protein, wherein the gene-editing protein is capable of creating a nick or a double-strand break in a target DNA molecule. In another embodiment, the nick or double-strand break results in inactivation of a gene. Still other embodiments are directed to a method for generating an inactive, reduced-activity or dominant-negative form of a protein in vivo. In one embodiment, the protein is survivin. Still other embodiments are directed to a method for repairing one or more mutations in a cell in vivo. In one embodiment, the cell is contacted with a repair template. In another embodiment, the repair template is a DNA molecule. In a further embodiment, the repair template does not contain a binding site of the gene-editing protein. In a still further embodiment, the repair template encodes an amino-acid sequence that is encoded by a DNA sequence that comprises a binding site of the gene-editing protein.

[0176] Other embodiments are directed to a method for treating a patient comprising administering to the patient a therapeutically or cosmetically effective amount of a protein or a nucleic acid encoding a protein. In one embodiment, the treatment results in one or more of the patient's symptoms being ameliorated. Certain embodiments are directed to a method for treating a patient comprising: a. inducing a cell to express a protein of interest by transfecting the cell in vivo with a nucleic acid encoding the protein of interest and/or b. reprogramming the cell in vivo. In one embodiment, the cell is reprogrammed to a less differentiated state. In another embodiment, the cell is reprogrammed by transfecting the cell with one or more synthetic RNA molecules encoding one or more reprogramming proteins. In a further embodiment, the cell is differentiated. In a still further embodiment, the cell is differentiated into one of: a skin cell, a glucose-responsive insulin-producing cell, a hematopoietic cell, a cardiac cell, a retinal cell, a renal cell, a neural cell, a stromal cell, a fat cell, a bone cell, a muscle cell, an oocyte, and a sperm cell. Other embodiments are directed to a method for treating a patient comprising: a. inducing a cell to express a gene-editing protein by transfecting the cell in vivo with a nucleic acid encoding a gene-editing protein and/or b. reprogramming the cell in vivo.

[0177] Other embodiments are directed to a complexation medium. In one embodiment, the complexation medium has a pH greater than about 7, or greater than about 7.2, or greater than about 7.4, or greater than about 7.6, or greater than about 7.8, or greater than about 8.0, or greater than about 8.2, or greater than about 8.4, or greater than about 8.6, or greater than about 8.8, or greater than about 9.0. In another embodiment, the complexation medium comprises transferrin. In a further embodiment, the complexation medium comprises DMEM. In a still further embodiment, the complexation medium comprises DMEM/F12. Still other embodiments are directed to a method for forming nucleic-acid-transfection-reagent complexes. In one embodiment, the transfection reagent is incubated with a complexation medium. In another embodiment, the incubation occurs before a mixing step. In a further embodiment, the incubation step is between about 5 seconds and about 5 minutes or between about 10 seconds and about 2 minutes or between about 15 seconds and about 1 minute or between about 30 seconds and about 45 seconds. In one embodiment, the transfection reagent is selected from Table 2. In another embodiment, the transfection reagent is a lipid or lipidoid. In a further embodiment, the transfection reagent comprises a cation. In a still further embodiment, the cation is a multivalent cation. In a still further embodiment, the transfection reagent is N1-[2-((1S)-1-[(3-aminopropyl)amino]-4-[di(3-amino-propyl)amino]butylcarboxamido)ethyl]-3,4-di[oleyloxy]-benzamide (a.k.a. MVL5) or a derivative thereof.

[0178] Certain embodiments are directed to a method for inducing a cell to express a protein by contacting the cell with a nucleic acid in vivo. In one embodiment, the cell is a mammalian cell. In another embodiment, the cell is a human cell or a rodent cell. Other embodiments are directed to a cell produced using one or more of the methods of the present invention. In one embodiment, the cell is present in a patient. In another embodiment, the cell is isolated from a patient. Other embodiments are directed to a screening library comprising a cell produced using one or more of the methods of the present invention. In one embodiment, the screening library is used for at least one of: toxicity screening, including: cardiotoxicity screening, neurotoxicity screening, and hepatotoxicity screening, efficacy screening, high-throughput screening, high-content screening, and other screening.

[0179] Other embodiments are directed to a kit containing a nucleic acid. In one embodiment, the kit contains a delivery reagent (a.k.a. “transfection reagent”). In another embodiment, the kit is a reprogramming kit. In a further embodiment, the kit is a gene-editing kit. Other embodiments are directed to a kit for producing nucleic acids. In one embodiment, the kit contains at least two of: pseudouridine-triphosphate, 5-methyluridine triphosphate, 5-methylcytidine triphosphate, 5-hydroxymethylcytidine triphosphate, N4-methylcytidine triphosphate, N4-acetylcytidine triphosphate, and 7-deazaguanosine triphosphate or one or more derivatives thereof. Other embodiments are directed to a therapeutic or cosmetic comprising a nucleic acid. In one embodiment, the therapeutic or cosmetic is a pharmaceutical composition. In another embodiment, the pharmaceutical composition is formulated. In a further embodiment, the formulation comprises an aqueous suspension of liposomes. Example liposome components are set forth in Table 2, and are given by way of example, and not by way of limitation. In one embodiment, the liposomes include one or more polyethylene glycol (PEG) chains. In another embodiment, the PEG is PEG2000. In a further embodiment, the liposomes include 1,2-distearoyl-sn-glycero-3-phosphoethanolamine (DSPE) or a derivative thereof. In one embodiment, the therapeutic comprises one or more ligands. In another embodiment, the therapeutic comprises at least one of: androgen, CD30 (TNFRSF8), a cell-penetrating peptide, CXCR, estrogen, epidermal growth factor, EGFR, HER2, folate, insulin, insulin-like growth factor-I, interleukin-13, integrin, progesterone, stromal-derived-factor-1, thrombin, vitamin D, and transferrin or a biologically active fragment or variant thereof. Still other embodiments are directed to a therapeutic or cosmetic comprising a cell generated using one or more of the methods of the present invention. In one embodiment, the therapeutic is administered to a patient for the treatment of at least one of: type 1 diabetes, heart disease, including ischemic and dilated cardiomyopathy, macular degeneration, Parkinson's disease, cystic fibrosis, sickle-cell anemia, thalassemia, Fanconi anemia, severe combined immunodeficiency, hereditary sensory neuropathy, xeroderma pigmentosum, Huntington's disease, muscular dystrophy, amyotrophic lateral sclerosis, Alzheimer's disease, cancer, and infectious diseases including: hepatitis and HIV/AIDS.

TABLE 2
Illustrative Biocompatible Lipids

| | |
|---|---|
| 1 | 3β-[N-(N′,N′-dimethylaminoethane)-carbamoyl]cholesterol |
| | (DC-Cholesterol) |
| 2 | 1,2-dioleoyl-3-trimethylammonium-propane (DOTAP/18:1 TAP) |
| 3 | N-(4-carboxybenzyl)-N,N-dimethyl-2,3-bis(oleoyloxy)propan-1- |
| | aminium (DOBAQ) |
| 4 | 1,2-dimyristoyl-3-trimethylammonium-propane (14:0 TAP) |
| 5 | 1,2-dipalmitoyl-3-trimethylammonium-propane (16:0 TAP) |
| 6 | 1,2-stearoyl-3-trimethylammonium-propane (18:0 TAP) |
| 7 | 1,2-dioleoyl-3-dimethylammonium-propane (DODAP/18:1 DAP) |
| 8 | 1,2-dimyristoyl-3-dimethylammonium-propane (14:0 DAP) |
| 9 | 1,2-dipalmitoyl-3-dimethylammonium-propane (16:0 DAP) |
| 10 | 1,2-distearoyl-3-dimethylammonium-propane (18:0 DAP) |
| 11 | dimethyldioctadecylammonium (18:0 DDAB) |
| 12 | 1,2-dilauroyl-sn-glycero-3-ethylphosphocholine (12:0 EthylPC) |
| 13 | 1,2-dimyristoyl-sn-glycero-3-ethylphosphocholine (14:0 EthylPC) |
| 14 | 1,2-dimyristoleoyl-sn-glycero-3-ethylphosphocholine (14:1 EthylPC) |
| 15 | 1,2-dipalmitoyl-sn-glycero-3-ethylphosphocholine (16:0 EthylPC) |
| 16 | 1,2-distearoyl-sn-glycero-3-ethylphosphocholine (18:0 EthylPC) |
| 17 | 1,2-dioleoyl-sn-glycero-3-ethylphosphocholine (18:1 EthylPC) |
| 18 | 1-palmitoyl-2-oleoyl-sn-glycero-3-ethylphosphocholine |
| | (16:1-18:1 EthylPC) |
| 19 | 1,2-di-O-octadecenyl-3-trimethylammonium propane (DOTMA) |
| 20 | N1-[2-((1S)-1-[(3-aminopropyl)amino]-4-[di(3-amino- |
| | propyl)amino]butylcarboxamido)ethyl]-3,4-di[oleyloxy]- |
| | benzamide (MVL5) |
| 21 | 2,3-dioleyloxy-N-[2-spermine carboxamide]ethyl-N,N-dimethyl-1- |
| | propanammonium trifluoroacetate (DOSPA) |
| 22 | 1,3-di-oleoyloxy-2-(6-carboxy-spermyl)-propylamid (DOSPER) |
| 23 | N-[1-(2,3-dimyristyloxy)propyl]-N,N-dimethyl-N-(2-hydroxy- |
| | ethyl)ammonium bromide (DMRIE) |
| 24 | dioctadecyl amidoglyceryl spermine (DOGS) |
| 25 | dioleoyl phosphatidyl ethanolamine (DOPE) |

[0180] In some embodiments, the present invention relates to one or more administration techniques described in U.S. Pat. Nos. 5,711,964; 5,891,468; 6,316,260; 6,413,544; 6,770,291; and 7,390,780, the entire contents of which are hereby incorporated by reference in their entireties.

[0181] Certain embodiments are directed to a nucleic acid comprising a 5′-cap structure selected from Cap 0, Cap 1, Cap 2, and Cap 3 or a derivative thereof. In one embodiment, the nucleic acid comprises one or more UTRs. In another embodiment, the one or more UTRs increase the stability of the nucleic acid. In a further embodiment, the one or more UTRs comprise an alpha-globin or beta-globin 5′-UTR. In a still further embodiment, the one or more UTRs comprise an alpha-globin or beta-globin 3′-UTR. In a still further embodiment, the synthetic RNA molecule comprises an alpha-globin or beta-globin 5′-UTR and an alpha-globin or beta-globin 3′-UTR. In one embodiment, the 5′-UTR comprises a Kozak sequence that is substantially similar to the Kozak consensus sequence. In another embodiment, the nucleic acid comprises a 3-poly(A) tail. In a further embodiment, the 3′-poly(A) tail is between about 20 nt and about 250 nt or between about 120 nt and about 150 nt long. In a further embodiment, the 3′-poly(A) tail is about 20 nt, or about 30 nt, or about 40 nt, or about 50 nt, or about 60 nt, or about 70 nt, or about 80 nt, or about 90 nt, or about 100 nt, or about 110 nt, or about 120 nt, or about 130 nt, or about 140 nt, or about 150 nt, or about 160 nt, or about 170 nt, or about 180 nt, or about 190 nt, or about 200 nt, or about 210 nt, or about 220 nt, or about 230 nt, or about 240 nt, or about 250 nt long.

[0182] Other embodiments are directed to a method for reprogramming a cell in vivo. In one embodiment, the cell is reprogrammed by contacting the cell with one or more nucleic acids. In one embodiment, the cell is contacted with a plurality of nucleic acids encoding at least one of: Oct4 protein, Sox2 protein, Klf4 protein, c-Myc protein, Lin28 protein or a biologically active fragment, variant or derivative thereof. In another embodiment, the cell is contacted with a plurality of nucleic acids encoding a plurality of proteins including: Oct4 protein, Sox2 protein, Klf4 protein, and c-Myc protein or one or more biologically active fragments, variants or derivatives thereof. Still other embodiments are directed to a method for gene editing a cell in vivo. In one embodiment, the cell is gene-edited by contacting the cell with one or more nucleic acids.

[0183] Nucleic acids, including liposomal formulations containing nucleic acids, when delivered in vivo, can accumulate in the liver and/or spleen. It has now been discovered that nucleic acids encoding proteins can modulate protein expression in the liver and spleen, and that nucleic acids used in this manner can constitute potent therapeutics for the treatment of liver and spleen diseases. Certain embodiments are therefore directed to a method for treating liver and/or spleen disease by delivering to a patient a nucleic acid encoding a protein of interest. Other embodiments are directed to a therapeutic composition comprising a nucleic acid encoding a protein of interest, for the treatment of liver and/or spleen disease. Diseases and conditions of the liver and/or spleen that can be treated include, but are not limited to: hepatitis, alcohol-induced liver disease, drug-induced liver disease, Epstein Barr virus infection, adenovirus infection, cytomegalovirus infection, toxoplasmosis, Rocky Mountain spotted fever, non-alcoholic fatty liver disease, hemochromatosis, Wilson's Disease, Gilbert's Disease, and cancer of the liver and/or spleen.

[0184] Certain embodiments are directed to a method for inducing a cell in vivo to express a protein of interest comprising contacting a cell in vivo with a solution comprising albumin that is treated with an ion-exchange resin or charcoal and one or more nucleic acid molecules, wherein at least one of the one or more nucleic acid molecules encodes a protein of interest. In one embodiment, the method results in the cell expressing the protein of interest. In another embodiment, the one or more nucleic acid molecules comprise a synthetic RNA molecule. In one embodiment, the cell is a skin cell. In another embodiment, the cell is a muscle cell. In yet another embodiment, the cell is a dermal fibroblast. In yet another embodiment, the cell is a myoblast. In one embodiment, the protein of interest is an extracellular matrix protein. In another embodiment, the protein of interest is selected from: elastin, collagen, laminin, fibronectin, vitronectin, lysyl oxidase, elastin binding protein, a growth factor, fibroblast growth factor, transforming growth factor beta, granulocyte colony-stimulating factor, a matrix metalloproteinase, an actin, fibrillin, microfibril-associated glycoprotein, a lysyl-oxidase-like protein, and platelet-derived growth factor. In one embodiment, the solution is delivered to the dermis. In another embodiment, the delivering is by injection. In yet another embodiment, the delivering is by injection using a microneedle array. In one embodiment, the solution further comprises a growth factor. In another embodiment, the growth factor is selected from: fibroblast growth factor and transforming growth factor beta. In yet another embodiment, the solution further comprises cholesterol.

[0185] Other embodiments are directed a method for inducing a cell in vivo to express a protein of interest comprising contacting a cell in vivo with a solution comprising cholesterol and one or more nucleic acid molecules, wherein at least one of the one or more nucleic acid molecules encodes a protein of interest. In one embodiment, the method results in the cell expressing the protein of interest. Still other embodiments are directed to a method for transfecting a cell in vivo with a nucleic acid molecule comprising contacting a cell in vivo with a solution comprising albumin that is treated with an ion-exchange resin or charcoal and a nucleic acid molecule. In one embodiment, the method results in the cell being transfected with the nucleic acid molecule. In another embodiment, the nucleic acid molecule is one of: a dsDNA molecule, a ssDNA molecule, a dsRNA molecule, a ssRNA molecule, a plasmid, an oligonucleotide, a synthetic RNA molecule, a miRNA molecule, an mRNA molecule, an siRNA molecule. Still other embodiments are directed to a method for treating a patient comprising delivering to a patient a composition comprising albumin that is treated with an ion-exchange resin or charcoal and one or more nucleic acid molecules, wherein at least one of the one or more nucleic acid molecules encodes a protein of interest. In one embodiment, the method results in the expression of the protein of interest in the patient. In another embodiment, the method results in the expression of the protein of interest in the dermis of the patient.

[0186] Certain embodiments are directed to a cosmetic composition comprising albumin that is treated with an ion-exchange resin or charcoal and a nucleic acid molecule. Other embodiments are directed to a cosmetic treatment article. In one embodiment, the cosmetic treatment article comprises a device configured to deliver a composition to a patient. In another embodiment, the nucleic acid molecule encodes elastin protein or collagen protein. Still other embodiments are directed to a solution for transfecting a cell in vivo comprising cholesterol or a cholesterol analog and one or more nucleic acid molecules. In one embodiment, the cholesterol or cholesterol analog is covalently bound to at least one of the one or more nucleic acid molecules. In another embodiment, the cholesterol analog is an oxysterol. In yet another embodiment, the cholesterol analog includes one or more of: an A-ring substitution, a B-ring substitution, a D-ring substitution, a side-chain substitution, a cholestanoic acid, a cholestenoic acid, a polyunsaturated moiety, a deuterated moiety, a fluorinated moiety, a sulfonated moiety, a phosphorylated moiety, and a fluorescent moiety. In yet another embodiment, the method comprises treating the patient with one or more of: a dermal filler, a neurotoxin (by way of illustration sodium channel inhibitors (e.g., tetrodotoxin), potassium channel inhibitors (e.g., tetraethylammonium), chloride channel inhibitors (e.g., chlorotoxin and curare), calcium channel inhibitors (e.g., conotoxin), synaptic vesicle release inhibitors (e.g., botulinum toxin and tetanus toxin) and blood brain barrier inhibitor (e.g., aluminum and mercury)) and a repair-inducing treatment.

[0187] For instance, botulinum toxin type A has been approved by the U.S. Food and Drug Administration (FDA) for the treatment of essential blepharospasm, strabismus and hemifacial spasm in patients over the age of twelve, cervical dystonia, glabellar line (facial) wrinkles and for treating hyperhydrosis and botulinum toxin type B has been approved for the treatment of cervical dystonia. The present compositions may be combined with these toxins in the treatment of these diseases.

[0188] Further the combination of any one of the aforementioned toxins may be used in combination with the present compositions for various cosmetic procedures, including, without limitation, facial wrinkles, hyperkinetic skin lines, glabellar lines, crow's feet, marionette lines, skin disorders, nasolabial folds, blepharospasm, strabismus, hemifacial spasms and sweating disorders. Alternatively, the present compositions may be used to in these cosmetic procedures as a monotherapy.

[0189] Certain embodiments are directed to a combination therapy comprising one or more of the therapeutic or cosmetic compositions of the present invention and one or more adjuvant therapies or cosmetic treatments. In certain embodiments, one or more of the therapeutic or cosmetic compositions of the present invention are administered to a subject which is undergoing treatment with one or more adjuvant therapies or cosmetic treatments. Example adjuvant therapies and cosmetic treatments are set forth in Table 3 and Table 5 of U.S. Provisional Application No. 61/721,302, the contents of which are hereby incorporated by reference, and are given by way of example, and not by way of limitation.

TABLE 3
Illustrative Adjuvant Therapies

| | | Example |
|---|---|---|
| Therapy/Treatment Class | Disease/Condition | Therapy/Treatment |
| Acetylcholinesterase inhibitors | Myasthenia gravis, Glaucoma, | Edrophonium |
| | Alzheimer's disease, Lewy body | |
| | dementia, Postural tachycardia | |
| | syndrome | |
| Angiotensin-converting-enzyme | Hypertension, Congestive heart failure | Perindopril |
| inhibitor | | |
| Alkylating agents | Cancer | Cisplatin |
| Angiogenesis inhibitors | Cancer, Macular degeneration | Bevacizumab |
| Angiotensin II receptor antagonists | Hypertension, Diabetic nephropathy, | Valsartan |
| | Congestive heart failure | |
| Antibiotics | Bacterial infection | Amoxicillin |
| Antidiabetic drugs | Diabetes | Metformin |
| Antimetabolites | Cancer, Infection | 5-fluorouracil (5FU) |
| Antisense oligonucleotides | Cancer, Diabetes, Amyotrophic lateral | Mipomersen |
| | sclerosis (ALS), Hypercholesterolemia | |
| Cytotoxic antibiotics | Cancer | Doxorubicin |
| Deep-brain stimulation | Chronic pain, Parkinson's disease, | N/A |
| | Tremor, Dystonia | |
| Dopamine agonists | Parkinson's disease, Type II diabetes, | Bromocriptine |
| | Pituitary tumors | |
| Entry/Fusion inhibitors | HIV/AIDS | Maraviroc |
| Glucagon-like peptide-1 agonists | Diabetes | Exenatide |
| Glucocorticoids | Asthma, Adrenal insufficiency, | Dexamethasone |
| | Inflammatory diseases, Immune | |
| | diseases, Bacterial meningitis | |
| Immunosuppressive drugs | Organ transplantation, Inflammatory | Azathioprine |
| | diseases, Immune diseases | |
| Insulin/Insulin analogs | Diabetes | NPH insulin |
| Integrase inhibitors | HIV/AIDS | Raltegravir |
| MAO-B inhibitors | Parkinson's disease, Depression, | Selegiline |
| | Dementia | |
| Maturation inhibitors | HIV/AIDS | Bevirimat |
| Nucleoside analog reverse- | HIV/AIDS, Hepatitis B | Lamivudine |
| transcriptase inhibitors | | |
| Nucleotide analog reverse- | HIV/AIDS, Hepatitis B | Tenofovir |
| transcriptase inhibitors | | |
| Non-nucleoside reverse-transcriptase | HIV/AIDS | Rilpivirine |
| inhibitors | | |
| Pegylated interferon | Hepatitis B/C, Multiple sclerosis | Interferon beta-1a |
| Plant alkaloids/terpenoids | Cancer | Paclitaxel |
| Protease inhibitors | HIV/AIDS, Hepatitis C, Other viral | Telaprevir |
| | infections | |
| Radiotherapy | Cancer | Brachytherapy |
| Renin inhibitors | Hypertension | Aliskiren |
| Statins | Hypercholesterolemia | Atorvastatin |
| Topoisomerase inhibitors | Cancer | Topotecan |
| Vasopressin receptor antagonist | Hyponatremia, Kidney disease | Tolvaptan |
| Dermal filler | Wrinkles, aged skin | Hyaluronic Acid |
| Botulinum toxin | Wrinkles, aged skin | botulinum toxin type A |
| Induction of skin repair | Acne scars, aged skin | Laser treatment, |
| | | dermabrasion |

[0190] Pharmaceutical preparations may additionally comprise delivery reagents (a.k.a. “transfection reagents”) and/or excipients. Pharmaceutically acceptable delivery reagents, excipients, and methods of preparation and use thereof, including methods for preparing and administering pharmaceutical preparations to patients (a.k.a. “subjects”) are well known in the art, and are set forth in numerous publications, including, for example, in US Patent Appl. Pub. No. US 2008/0213377, the entirety of which is incorporated herein by reference.

[0191] For example, the present compositions can be in the form of pharmaceutically acceptable salts. Such salts include those listed in, for example, J. Pharma. Sci. 66, 2-19 (1977) and The Handbook of Pharmaceutical Salts; Properties, Selection, and Use. P. H. Stahl and C. G. Wermuth (eds.), Verlag, Zurich (Switzerland) 2002, which are hereby incorporated by reference in their entirety. Non-limiting examples of pharmaceutically acceptable salts include: sulfate, citrate, acetate, oxalate, chloride, bromide, iodide, nitrate, bisulfate, phosphate, acid phosphate, isonicotinate, lactate, salicylate, acid citrate, tartrate, oleate, tannate, pantothenate, bitartrate, ascorbate, succinate, maleate, gentisinate, fumarate, gluconate, glucaronate, saccharate, formate, benzoate, glutamate, methanesulfonate, ethanesulfonate, benzenesulfonate, p-toluenesulfonate, camphorsulfonate, pamoate, phenylacetate, trifluoroacetate, acrylate, chlorobenzoate, dinitrobenzoate, hydroxybenzoate, methoxybenzoate, methylbenzoate, o-acetoxybenzoate, naphthalene-2-benzoate, isobutyrate, phenylbutyrate, α-hydroxybutyrate, butyne-1,4-dicarboxylate, hexyne-1,4-dicarboxylate, caprate, caprylate, cinnamate, glycollate, heptanoate, hippurate, malate, hydroxymaleate, malonate, mandelate, mesylate, nicotinate, phthalate, teraphthalate, propiolate, propionate, phenylpropionate, sebacate, suberate, p-bromobenzenesulfonate, chlorobenzenesulfonate, ethylsulfonate, 2-hydroxyethylsulfonate, methylsulfonate, naphthalene-1-sulfonate, naphthalene-2-sulfonate, naphthalene-1,5-sulfonate, xylenesulfonate, tartarate salts, hydroxides of alkali metals such as sodium, potassium, and lithium; hydroxides of alkaline earth metal such as calcium and magnesium; hydroxides of other metals, such as aluminum and zinc; ammonia, and organic amines, such as unsubstituted or hydroxy-substituted mono-, di-, or tri-alkylamines, dicyclohexylamine; tributyl amine; pyridine; N-methyl, N-ethylamine; diethylamine; triethylamine; mono-, bis-, or tris-(2-OH-lower alkylamines), such as mono-; bis-, or tris-(2-hydroxyethyl)amine, 2-hydroxy-tert-butylamine, or tris-(hydroxymethyl)methylamine, N,N-di-lower alkyl-N-(hydroxyl-lower alkyl)-amines, such as N,N-dimethyl-N-(2-hydroxyethyl)amine or tri-(2-hydroxyethyl)amine; N-methyl-D-glucamine; and amino acids such as arginine, lysine, and the like.

[0192] The present pharmaceutical compositions can comprises excipients, including liquids such as water and oils, including those of petroleum, animal, vegetable, or synthetic origin, such as peanut oil, soybean oil, mineral oil, sesame oil and the like. The pharmaceutical excipients can be, for example, saline, gum acacia, gelatin, starch paste, talc, keratin, colloidal silica, urea and the like. In addition, auxiliary, stabilizing, thickening, lubricating, and coloring agents can be used. In one embodiment, the pharmaceutically acceptable excipients are sterile when administered to a subject. Suitable pharmaceutical excipients also include starch, glucose, lactose, sucrose, gelatin, malt, rice, flour, chalk, silica gel, sodium stearate, glycerol monostearate, talc, sodium chloride, dried skim milk, glycerol, propylene, glycol, water, ethanol and the like. Any agent described herein, if desired, can also comprise minor amounts of wetting or emulsifying agents, or pH buffering agents.

[0193] In various embodiments, the compositions described herein can administered in an effective dose of, for example, from about 1 mg/kg to about 100 mg/kg, about 2.5 mg/kg to about 50 mg/kg, or about 5 mg/kg to about 25 mg/kg. The precise determination of what would be considered an effective dose may be based on factors individual to each patient, including their size, age, and type of disease. Dosages can be readily ascertained by those of ordinary skill in the art from this disclosure and the knowledge in the art. For example, doses may be determined with reference Physicians' Desk Reference, 66th Edition, PDR Network; 2012 Edition (Dec. 27, 2011), the contents of which are incorporated by reference in its entirety.

[0194] The active compositions of the present invention may include classic pharmaceutical preparations. Administration of these compositions according to the present invention may be via any common route so long as the target tissue is available via that route. This includes oral, nasal, or buccal. Alternatively, administration may be by intradermal, subcutaneous, intramuscular, intraperitoneal or intravenous injection, or by direct injection into cancer tissue. The agents disclosed herein may also be administered by catheter systems. Such compositions would normally be administered as pharmaceutically acceptable compositions as described herein.

[0195] Upon formulation, solutions may be administered in a manner compatible with the dosage formulation and in such amount as is therapeutically effective. The formulations may easily be administered in a variety of dosage forms such as injectable solutions, drug release capsules and the like. For parenteral administration in an aqueous solution, for example, the solution generally is suitably buffered and the liquid diluent first rendered isotonic with, for example, sufficient saline or glucose. Such aqueous solutions may be used, for example, for intravenous, intramuscular, subcutaneous and intraperitoneal administration. Preferably, sterile aqueous media are employed as is known to those of skill in the art, particularly in light of the present disclosure.

[0196] Exemplary subjects or patients refers to any vertebrate including, without limitation, humans and other primates (e.g., chimpanzees and other apes and monkey species), farm animals (e.g., cattle, sheep, pigs, goats, and horses), domestic mammals (e.g., dogs and cats), laboratory animals (e.g., rodents such as mice, rats, and guinea pigs), and birds (e.g., domestic, wild and game birds such as chickens, turkeys and other gallinaceous birds, ducks, geese, and the like). In some embodiments, the subject is a mammal. In some embodiments, the subject is a human.

[0197] Administration of the compositions described herein may be, for example, by injection, topical administration, ophthalmic administration and intranasal administration. The injection may include injections such as, but not limited to, intradermal, subcutaneous and intramuscular. The injection, in some embodiments, may be linked to an electrical force (e.g. electroporation, including with devices that find use in electrochemotherapy (e.g. CLINIPORATOR, IGEA Srl, Carpi [MO], Italy)). The topical administration may be, but is not limited to, a cream, lotion, ointment, gel, spray, solution and the like. The topical administration may further include a penetration enhancer such as, but not limited to, surfactants, fatty acids, bile salts, chelating agents, non-chelating non-surfactants, polyoxyethylene-9-lauryl ether, polyoxyethylene-20-cetyl ether, fatty acids and/or salts in combination with bile acids and/or salts, sodium salt in combination with lauric acid, capric acid and UDCA, and the like. The topical administration may also include a fragrance, a colorant, a sunscreen, an antibacterial and/or a moisturizer. The compositions described herein may be administered to at least one site such as, but not limited to, forehead, scalp, hair follicles, hair, upper eyelids, lower eyelids, eyebrows, eyelashes, infraorbital area, periorbital areas, temple, nose, nose bridge, cheeks, tongue, nasolabial folds, lips, periobicular areas, jaw line, ears, neck, breast, forearm, upper arm, palm, hand, finger, nails, back, abdomen, sides, buttocks, thigh, calf, feet, toes and the like.

Sequences

| SEQ ID NO | Description |
|---|---|
| 1 | StsI |
| 2 | StsI-HA |
| 3 | StsI-HA2 |
| 4 | StsI-UHA |
| 5 | StsI-UHA2 |
| 6 | StsI-HF |
| 7 | StsI-UHF |
| 8 | Oct4 |
| 9 | Sox2 |
| 10 | Klf4 |
| 11 | c-Myc |
| 12 | BIRC5_exon1 |
| 13 | BIRC5_exon2 |
| 14 | BIRC5_exon3 |
| 15 | BIRC5_exon4 |
| 16 | BIRC5-1.1-L |
| 17 | BIRC5-1.1-R |
| 18 | BIRC5-1.2-L |
| 19 | BIRC5-1.2-R |
| 20 | BIRC5-1.3-L |
| 21 | BIRC5-1.3-R |
| 22 | BIRC5-2.1-L |
| 23 | BIRC5-2.1-R |
| 24 | BIRC5-2.2-L |
| 25 | BIRC5-2.2-R |
| 26 | BIRC5-3.1-L |
| 27 | BIRC5-3.1-R |
| 28 | CDK1 |
| 29 | CDK2 |
| 30 | CDK3 |
| 31 | CDK4 |
| 32 | CDK5 |
| 33 | CDK6 |
| 34 | BIRC5 |
| 35 | HIF1A |
| 36 | RRM2 |
| 37 | KRAS |
| 38 | EGFR |
| 39 | MYC |
| 40 | PKN3 |
| 41 | KIF11 |
| 42 | APC |
| 43 | BRCA1 |
| 44 | BRCA2 |
| 45 | TP53 |
| 46 | APP |
| 47 | HTT |
| 48 | IAPP |
| 49 | MAPT |
| 50 | PRNP |
| 51 | SNCA |
| 52 | SOD1 |
| 53 | FokI |
| 54 | Repeat1 |
| 55 | Repeat2 |
| 56 | Repeat3 |
| 57 | EO-GHGG-FokI |
| 58 | GHGG-FokI |
| 59 | EO-GHGG-StsI |
| 60 | GHGG-StsI |
| 61 | collagen alpha-1(I) chain preproprotein |
| 62 | collagen alpha-2(I) chain precursor |
| 63 | collagen alpha-1(II) chain isoform 1 precursor |
| 64 | collagen alpha-1(II) chain isoform 2 precursor |
| 65 | collagen alpha-1(III) chain preproprotein |
| 66 | collagen alpha-1(IV) chain preproprotein |
| 67 | collagen alpha-2(IV) chain preproprotein |
| 68 | collagen alpha-3(IV) chain precursor |
| 69 | collagen alpha-4(IV) chain precursor |
| 70 | collagen alpha-5(IV) chain isoform 1 precursor |
| 71 | collagen alpha-6(IV) chain isoform A precursor |
| 72 | collagen alpha-1(V) chain isoform 1 preproprotein |
| 73 | collagen alpha-2(V) chain preproprotein |
| 74 | collagen alpha-3(V) chain preproprotein |
| 75 | collagen alpha-1(VI) chain precursor |
| 76 | collagen alpha-2(VI) chain isoform 2C2 precursor |
| 77 | collagen alpha-3(VI) chain isoform 1 precursor |
| 78 | collagen alpha-1(VII) chain precursor |
| 79 | elastin isoform a precursor |
| 80 | elastin isoform b precursor |
| 81 | elastin isoform c precursor |
| 82 | elastin isoform d precursor |
| 83 | elastin isoform e precursor |
| 84 | elastin isoform f precursor |
| 85 | elastin isoform g precursor |
| 86 | elastin isoform h precursor |
| 87 | elastin isoform i precursor |
| 88 | elastin isoform j precursor |
| 89 | elastin isoform k precursor |
| 90 | elastin isoform l precursor |
| 91 | elastin isoform m precursor |
| 92 | protein-lysine 6-oxidase isoform 1 preproprotein |
| 93 | protein-lysine 6-oxidase isoform 2 |
| 94 | telomerase reverse transcriptase isoform 1 |
| 95 | telomerase reverse transcriptase isoform 2 |
| 96 | fibronectin isoform 1 preproprotein |
| 97 | fibronectin isoform 3 preproprotein |
| 98 | fibronectin isoform 4 preproprotein |
| 99 | fibronectin isoform 5 preproprotein |
| 100 | fibronectin isoform 6 preproprotein |
| 101 | fibronectin isoform 7 preproprotein |
| 102 | vitronectin precursor |
| 103 | nidogen-1 precursor |
| 104 | laminin subunit alpha-1 precursor |
| 105 | insulin-like growth factor I isoform 1 preproprotein |
| 106 | fibroblast growth factor 1 isoform 1 precursor |
| 107 | fibroblast growth factor 2 |
| 108 | transforming growth factor beta-1 precursor |
| 109 | transforming growth factor beta-2 isoform 1 precursor |
| 110 | transforming growth factor beta-2 isoform 2 precursor |
| 111 | actin, alpha skeletal muscle |
| 112 | actin, aortic smooth muscle |
| 113 | actin, cytoplasmic 1 |
| 114 | actin, alpha cardiac muscle 1 proprotein |
| 115 | actin, cytoplasmic 2 |
| 116 | actin, gamma-enteric smooth muscle isoform 1 precursor |
| 117 | actin, gamma-enteric smooth muscle isoform 2 precursor |
| 118 | granulocyte colony-stimulating factor isoform a precursor |
| 119 | granulocyte colony-stimulating factor isoform b precursor |
| 120 | granulocyte colony-stimulating factor isoform c precursor |
| 121 | granulocyte colony-stimulating factor isoform d precursor |
| 122 | platelet-derived growth factor subunit A isoform 1 |
| | preproprotein |
| 123 | platelet-derived growth factor subunit A isoform 2 |
| | preproprotein |
| 124 | platelet-derived growth factor subunit B isoform 1 |
| | preproprotein |
| 125 | platelet-derived growth factor subunit B isoform 2 |
| | preproprotein |
| 126 | platelet-derived growth factor C precursor |
| 127 | platelet-derived growth factor D isoform 1 precursor |
| 128 | platelet-derived growth factor D isoform 2 precursor |
| 129 | interstitial collagenase isoform 1 preproprotein |
| 130 | interstitial collagenase isoform 2 |
| 131 | neutrophil collagenase preproprotein |
| 132 | stromelysin-2 preproprotein |
| 133 | macrophage metalloelastase preproprotein |
| 134 | fibrillin-1 precursor |
| 135 | fibrillin-2 precursor |
| 136 | lysyl oxidase homolog 1 preproprotein |
| 137 | lysyl oxidase homolog 2 precursor |
| 138 | lysyl oxidase homolog 3 isoform 1 precursor |
| 139 | lysyl oxidase homolog 3 isoform 2 precursor |
| 140 | lysyl oxidase homolog 3 isoform 3 |
| 141 | lysyl oxidase homolog 4 precursor |
| 142 | microfibrillar-associated protein 2 isoform a precursor |
| 143 | microfibrillar-associated protein 2 isoform b precursor |
| 144 | microfibrillar-associated protein 5 precursor |
| 145 | disintegrin and metalloproteinase domain-containing protein |
| | 17 preprotein |
| 146 | desmoglein-2 preproprotein |
| 147 | DNA polymerase eta isoform 1 |
| 148 | DNA polymerase eta isoform 2 |
| 149 | DNA polymerase eta isoform 3 |
| 150 | ferrochelatase, mitochondrial isoform a precursor |
| 151 | ferrochelatase, mitochondrial isoform b precursor |
| 152 | filaggrin |
| 153 | hyaluronan synthase 1 isoform 1 |
| 154 | hyaluronan synthase 1 isoform 2 |
| 155 | hyaluronan synthase 2 |
| 156 | hyaluronan synthase 3 isoform a |
| 157 | hyaluronan synthase 3 isoform b |
| 158 | proopiomelanocortin |
| 159 | plakophilin-1 isoform 1a |
| 160 | plakophilin-1 isoform 1b |
| 161 | retinol dehydrogenase 10 |
| 162 | mitochondrial brown fat uncoupling protein 1 |
| 163 | tyrosinase precursor |

[0198] This invention is further illustrated by the following non-limiting examples.

### EXAMPLES

### Example 1

### RNA Synthesis

[0199] RNA encoding green fluorescent protein or the human proteins Elastin, Tyrosinase, Melanocortin 1 receptor, Hyaluronan synthase 1, Hyaluronan synthase 2, Hyaluronan synthase 3, Collagen type III al, Collagen type VII al, Interleukin 10, P-selectin glycoprotein ligand-1, Alpha-(1,3)-fucosyltransferase Oct4, Sox2, Klf4, c-Myc-2 (T58A), and Lin28 or TALENs targeting the human genes XPA, CCR5, TERT, MYC, and BIRC5, and comprising various combinations of canonical and non-canonical nucleotides, was synthesized from DNA templates using the T7 High Yield RNA Synthesis Kit and the Vaccinia Capping System kit with mRNA Cap 2′-O-Methyltransferase (all from New England Biolabs, Inc.), according to the manufacturer's instructions and the present inventors' previously disclosed inventions (U.S. application Ser. No. 13/465,490 (now U.S. Pat. No. 8,497,124), International Application No. PCT/US12/67966, U.S. application Ser. No. 13/931,251, and International Application No. PCT/US13/68118, the contents of all of which are hereby incorporated by reference in their entirety) (Table 4). The RNA was then diluted with nuclease-free water to between 100 ng/μL and 1000 ng/μL. For certain experiments, an RNase inhibitor (Superase•In, Life Technologies Corporation) was added at a concentration of 1 μL/100 μg of RNA. RNA solutions were stored at 4C. For reprogramming experiments, RNA encoding Oct4, Sox2, Klf4, c-Myc-2 (T58A), and Lin28 was mixed at a molar ratio of 3:1:1:1:1.

TABLE 4
RNA Synthesis

| | | Reaction | ivT |
|---|---|---|---|
| Template | Nucleotides | Volume/μL | Yield/μg |
| hELN | A, 0.5 7dG, 0.4 5mU, | 20 | 34.1 |
| | 5mC | | |
| Oct4 | A, 0.57 dG, 0.4 5mU, | 300 | 2752.0 |
| (SEQ ID NO: 8) | 5mC | | |
| Sox2 | A, 0.5 7dG, 0.4 5mU, | 100 | 965.0 |
| (SEQ ID NO: 9) | 5mC | | |
| Klf4 | A, 0.5 7dG, 0.4 5mU, | 100 | 1093.8 |
| (SEQ ID NO: 10) | 5mC | | |
| c-Myc-2 (T58A) | A, 0.5 7dG, 0.4 5mU, | 100 | 1265.6 |
| | 5mC | | |
| Lin28 | A, 0.5 7dG, 0.4 5mU, | 100 | 1197.8 |
| | 5mC | | |
| ELN | A, G, U, 5hmC | 20 | 67.6 |
| GFP | A, 0.5 7dG, 0.4 5mU, | 10 | 60.5 |
| | 5mC | | |
| GFP | A, 0.5 7dG, 0.4 5mU, | 10 | 25.5 |
| | 5hmC | | |
| GFP | A, G, U, 5hmC | 10 | 58.3 |
| GFP | A, 0.5 7dG, U, 5hmC | 10 | 47.3 |
| GFP | A, 0.5 7dG, 0.4 5mU, | 10 | 33.8 |
| | 5cC | | |
| GFP | A, G, U, 5hmC | 15 | 30.3 |
| GFP | A, G, U, 5hmC | 15 | 44.6 |
| GFP | A, G, U, 5hmC | 15 | 24.7 |
| TYR | A, G, U, 5hmC | 15 | 45.4 |
| MC1R | A, G, U, 5hmC | 15 | 47.5 |
| TYR | A, G, U, C | 20 | 67.0 |
| TYR | A, G, psU, C | 20 | 93.7 |
| TYR | A, G, 5mU, C | 20 | 85.7 |
| TYR | A, G, U, 5mC | 20 | 73.4 |
| TYR | A, G, U, 5hmC | 20 | 72.7 |
| TYR | A, 0.5 7dG, U, C | 20 | 62.7 |
| TYR | A, G, psU, 5mC | 20 | 116.3 |
| TYR | A, G, psU, 5hmC | 20 | 102.4 |
| TYR | A, 0.5 7dG, psU, C | 20 | 87.3 |
| TYR | A, G, 0.4 5mU, 5mC | 20 | 106.5 |
| TYR | A, G, 0.4 5mU, 5hmC | 20 | 85.0 |
| TYR | A, 0.5 7dG, 0.4 5mU, | 20 | 70.9 |
| | C | | |
| TYR | A, 0.5 7dG, U, 5mC | 20 | 88.5 |
| TYR | A, 0.5 7dG, U, 5hmC | 20 | 59.1 |
| TYR | A, 0.5 7dG, psU, 5mC | 20 | 7.8 |
| TYR | A, 0.5 7dG, psU, 5hmC | 20 | 98.0 |
| TYR | A, 0.5 7dG, 0.4 5mU, | 20 | 106.5 |
| | 5mC | | |
| TYR | A, 0.5 7dG, 0.4 5mU, | 20 | 82.3 |
| | 5hmC | | |
| HAS1 | A, G, 0.4 5mU, 5hmC | 20 | 178.4 |
| HAS2 | A, G, 0.4 5mU, 5hmC | 20 | 59.3 |
| HAS3 | A, G, 0.4 5mU, 5hmC | 20 | 102.6 |
| TYR | A, G, 0.4 5mU, 5hmC | 100 | 377.3 |
| COL3A1 | A, G, 0.4 5mU, 5hmC | 20 | 108.3 |
| COL7A1 | A, G, 0.4 5mU, 5hmC | 20 | 94.6 |
| IL10 | A, G, psU, C | 75 | 569.5 |
| SELPLG | A, G, psU, C | 75 | 542.6 |
| FUT7 | A, G, psU, C | 75 | 564.5 |
| Oct4 | A, G, U, C | 10 | 100.7 |
| (SEQ ID NO: 8) | | | |
| Oct4 | A, G, U, 5mC | 10 | 120.6 |
| (SEQ ID NO: 8) | | | |
| Oct4 | A, G, U, 5mC | 10 | 115.3 |
| (SEQ ID NO: 8) | | | |
| Oct4 | A, G, U, 5hmC | 10 | 101.4 |
| (SEQ ID NO: 8) | | | |
| Oct4 | A, G, U, 5cC | 10 | 50.8 |
| (SEQ ID NO: 8) | | | |
| Oct4 | A, G, U, 5fC | 10 | 84.0 |
| (SEQ ID NO: 8) | | | |
| Oct4 | A, G, U, 5hmC | 10 | 99.5 |
| (SEQ ID NO: 8) | | | |
| Sox2 | A, G, U, 5hmC | 10 | 84.0 |
| (SEQ ID NO: 9) | | | |
| Klf4 | A, G, U, 5hmC | 10 | 72.6 |
| (SEQ ID NO: 10) | | | |
| c-Myc-2 (T58A) | A, G, U, 5hmC | 10 | 82.4 |
| Lin28 | A, G, U, 5hmC | 10 | 83.1 |
| Oct4 | A, G, 0.4 5mU, 5hmC | 10 | 78.9 |
| (SEQ ID NO: 8) | | | |
| Sox2 | A, G, 0.4 5mU, 5hmC | 10 | 91.9 |
| (SEQ ID NO: 9) | | | |
| Klf4 | A, G, 0.4 5mU, 5hmC | 10 | 91.2 |
| (SEQ ID NO: 10) | | | |
| c-Myc-2 (T58A) | A, G, 0.4 5mU, 5hmC | 10 | 104.6 |
| Lin28 | A, G, 0.4 5mU, 5hmC | 10 | 103.2 |
| Oct4 | A, G, 5hU, 5hmC | 300 | 1925.5 |
| (SEQ ID NO: 8) | | | |
| Sox2 | A, G, 5hU, 5hmC | 100 | 641.8 |
| (SEQ ID NO: 9) | | | |
| Klf4 | A, G, 5hU, 5hmC | 100 | 739.0 |
| (SEQ ID NO: 10) | | | |
| c-Myc-2 (T58A) | A, G, 5hU, 5hmC | 100 | 574.0 |
| Lin28 | A, G, 5hU, 5hmC | 100 | 556.0 |

“A” refers to adenosine-5′-triphosphate, “G” refers to guanosine-5′-triphosphate, “U” refers to uridine-5′-triphosphate, “C” refers to cytidine-5′-triphosphate, “5mC” refers to 5-methylcytidine-5′-triphosphate, “5hmC” refers to 5-hydroxymethylcytidine-5′-triphosphate, “5cC” refers to 5-carboxycytidine-5′-triphosphate, “5fC” refers to 5-formylcytidine-5′-triphosphate, “psU” refers to 5-pseudouridine-5′-triphosphate, “5mU” refers to 5-methyluridine-5′-triphosphate, “5hU” refers to the 5′-triphosphate of uridine with a methyl group bound to an oxygen atom bound to the 5C position of the uridine, and “7dG” refers to 7-deazaguanosine-5′-triphosphate.

### Example 2

### Transfection of Cells with Synthetic RNA

[0200] For transfection in 6-well plates, 2 μg RNA and 6 μL transfection reagent (Lipofectamine RNAiMAX, Life Technologies Corporation) were first diluted separately in complexation medium (Opti-MEM, Life Technologies Corporation or DMEM/F12+10 μg/mL insulin+5.5 μg/mL transferrin+6.7 ng/mL sodium selenite+2 μg/mL ethanolamine) to a total volume of 60 μL each. Diluted RNA and transfection reagent were then mixed and incubated for 15 min at room temperature, according to the transfection reagent-manufacturer's instructions. Complexes were then added to cells in culture. Between 12 μL and 240 μL of complexes were added to each well of a 6-well plate, which already contained 2 mL of transfection medium per well. Plates were shaken gently to distribute the complexes throughout the well. Cells were incubated with complexes for 4 hours to overnight, before replacing the medium with fresh transfection medium (2 mL/well). Volumes were scaled for transfection in 24-well and 96-well plates. Alternatively, between 0.5 μg and 5 μg of RNA and between 2-3 μL of transfection reagent (Lipofectamine 2000, Life Technologies Corporation) per μg of RNA were first diluted separately in complexation medium (Opti-MEM, Life Technologies Corporation or DMEM/F12+10 μg/mL insulin+5.5 μg/mL transferrin+6.7 ng/mL sodium selenite+2 μg/mL ethanolamine) to a total volume of between 5 μL and 100 μL each. Diluted RNA and transfection reagent were then mixed and incubated for 10 min at room temperature. Complexes were then added to cells in culture. Between 10 μL and 200 μL of complexes were added to each well of a 6-well plate, which already contained 2 mL of transfection medium per well. In certain experiments, DMEM+10% FBS or DMEM+50% FBS was used in place of transfection medium. Plates were shaken gently to distribute the complexes throughout the well. Cells were incubated with complexes for 4 hours to overnight. In certain experiments, the medium was replaced with fresh transfection medium (2 mL/well) 4 h or 24 h after transfection.

### Example 3

### Toxicity of and Protein Translation from Synthetic RNA Containing Non-Canonical Nucleotides

[0201] Primary human fibroblasts were transfected according to Example 2, using RNA synthesized according to Example 1. Cells were fixed and stained 20-24 h after transfection using an antibody against Oct4. The relative toxicity of the RNA was determined by assessing cell density at the time of fixation.

### Example 4

### Transfection Medium Formulation

[0202] A cell-culture medium was developed to support efficient transfection of cells with nucleic acids and efficient reprogramming (“transfection medium”):

[0203] DMEM/F12+15 mM HEPES+2 mM L-alanyl-L-glutamine+10 μg/mL insulin+5.5 μg/mL transferrin+6.7 ng/mL sodium selenite+2 μg/mL ethanolamine+50 μg/mL L-ascorbic acid 2-phosphate sesquimagnesium salt hydrate+4 μg/mL cholesterol+1 μM hydrocortisone+25 μg/mL polyoxyethylenesorbitan monooleate+2 μg/mL D-alpha-tocopherol acetate+20 ng/mL bFGF+5 mg/mL treated human serum albumin.

[0204] A variant of this medium was developed to support robust, long-term culture of a variety of cell types, including pluripotent stem cells (“maintenance medium”):

[0205] DMEM/F12+2 mM L-alanyl-L-glutamine+10 μg/mL insulin+5.5 μg/mL transferrin+6.7 ng/mL sodium selenite+2 μg/mL ethanolamine+50 μg/mL L-ascorbic acid 2-phosphate sesquimagnesium salt hydrate+20 ng/mL bFGF+2 ng/mL TGF-31.

[0206] Transfection medium, in which the treated human serum albumin was treated by addition of 32 mM sodium octanoate, followed by heating at 60C for 4 h, followed by treatment with ion-exchange resin (AG501-X8(D), Bio-Rad Laboratories, Inc.) for 6 h at room temperature, followed by treatment with dextran-coated activated charcoal (C6241, Sigma-Aldrich Co. LLC.) overnight at room temperature, followed by centrifugation, filtering, adjustment to a 10% solution with nuclease-free water, followed by addition to the other components of the medium, was used as the transfection medium in all Examples described herein, unless otherwise noted. For reprogramming experiments, cells were plated either on uncoated plates in DMEM+10%-20% serum or on fibronectin and vitronectin-coated plates in transfection medium, unless otherwise noted. The transfection medium was not conditioned, unless otherwise noted. It is recognized that the formulation of the transfection medium can be adjusted to meet the needs of the specific cell types being cultured. It is further recognized that treated human serum albumin can be replaced with other treated albumin, for example, treated bovine serum albumin, without negatively affecting the performance of the medium. It is further recognized that other glutamine sources can be used instead of or in addition to L-alanyl-L-glutamine, for example, L-glutamine, that other buffering systems can be used instead of or in addition to HEPES, for example, phosphate, bicarbonate, etc., that selenium can be provided in other forms instead of or in addition to sodium selenite, for example, selenous acid, that other antioxidants can be used instead of or in addition to L-ascorbic acid 2-phosphate sesquimagnesium salt hydrate and/or D-alpha-tocopherol acetate, for example, L-ascorbic acid, that other surfactants can be used instead of or in addition to polyoxyethylenesorbitan monooleate, for example, Pluronic F-68 and/or Pluronic F-127, that other basal media can be used instead of or in addition to DMEM/F12, for example, MEM, DMEM, etc., and that the components of the culture medium can be varied with time, for example, by using a medium without TGF-β from day 0 to day 5, and then using a medium containing 2 ng/mL TGF-β after day 5, without negatively affecting the performance of the medium. It is further recognized that other ingredients can be added, for example, fatty acids, lysophosphatidic acid, lysosphingomyelin, sphingosine-1-phosphate, other sphingolipids, ROCK inhibitors, including Y-27632 and thiazovivin, members of the TGF-β/NODAL family of proteins, IL-6, members of the Wnt family of proteins, etc., at appropriate concentrations, without negatively affecting the performance of the medium, and that ingredients that are known to promote or inhibit the growth of specific cell types and/or agonists and/or antagonists of proteins or other molecules that are known to promote or inhibit the growth of specific cell types can be added to the medium at appropriate concentrations when it is used with those cell types without negatively affecting the performance of the medium, for example, sphingosine-1-phosphate and pluripotent stem cells. The present invention relates equally to ingredients that are added as purified compounds, to ingredients that are added as parts of well-defined mixtures, to ingredients that are added as parts of complex or undefined mixtures, for example, animal or plant oils, and to ingredients that are added by biological processes, for example, conditioning. The concentrations of the components can be varied from the listed values within ranges that will be obvious to persons skilled in the art without negatively affecting the performance of the medium. An animal component-free version of the medium was produced by using recombinant versions of all protein ingredients, and non-animal-derived versions of all other components, including semi-synthetic plant-derived cholesterol (Avanti Polar Lipids, Inc.).

### Example 5

### Transfection Medium Formulation

[0207] A medium was developed to support efficient transfection, reprogramming, and gene-editing of cells:

[0208] DMEM/F12+10 μg/mL insulin+5.5 μg/mL transferrin+6.7 ng/mL sodium selenite+20 ng/mL bFGF+5 mg/mL treated human serum albumin.

[0209] Variants of this medium were also developed to provide improved performance when used with specific transfection reagents, specific nucleic acids, and specific cell types: DMEM/F12+10 μg/mL insulin+5.5 μg/mL transferrin+6.7 ng/mL sodium selenite+4.5 μg/mL cholesterol+20 ng/mL bFGF+5 mg/mL treated human serum albumin, DMEM/F12+10 μg/mL insulin+5.5 μg/mL transferrin+6.7 ng/mL sodium selenite+1 μM hydrocortisone+20 ng/mL bFGF+5 mg/mL treated human serum albumin, and DMEM/F12+10 μg/mL insulin+5.5 μg/mL transferrin+6.7 ng/mL sodium selenite+4.5 μg/mL cholesterol+1 μM hydrocortisone+20 ng/mL bFGF+5 mg/mL treated human serum albumin.

[0210] Examples of additional components that were added to the cell-culture medium in certain experiments (listed with example concentrations) include: 15 mM HEPES, 2 mM L-alanyl-L-glutamine, 2 μg/mL ethanolamine, 10 μg/mL fatty acids, 10 μg/mL cod liver oil fatty acids (methyl esters), 25 μg/mL polyoxyethylenesorbitan monooleate, 2 μg/mL D-alpha-tocopherol acetate, 1-50 μg/mL L-ascorbic acid 2-phosphate sesquimagnesium salt hydrate, 200 ng/mL B18R, and 0.1% Pluronic F-68.

[0211] For certain experiments in which the medium was conditioned, the following variant was used:

[0212] DMEM/F12+15 mM HEPES+2 mM L-alanyl-L-glutamine+10 μg/mL insulin+5.5 μg/mL transferrin+6.7 ng/mL sodium selenite+2 μg/mL ethanolamine+4.5 μg/mL cholesterol+10 μg/mL cod liver oil fatty acids (methyl esters)+25 μg/mL polyoxyethylenesorbitan monooleate+2 μg/mL D-alpha-tocopherol acetate+1 μg/mL L-ascorbic acid 2-phosphate sesquimagnesium salt hydrate+0.1% Pluronic F-68+20 ng/mL bFGF+5 mg/mL treated human serum albumin.

[0213] For certain experiments in which the medium was not conditioned, the following variant was used.

[0214] DMEM/F12+15 mM HEPES+2 mM L-alanyl-L-glutamine+10 μg/mL insulin+5.5 μg/mL transferrin+6.7 ng/mL sodium selenite+2 μg/mL ethanolamine+4.5 μg/mL cholesterol+1 μM hydrocortisone+0-25 μg/mL polyoxyethylenesorbitan monooleate+2 μg/mL D-alpha-tocopherol acetate+50 μg/mL L-ascorbic acid 2-phosphate sesquimagnesium salt hydrate+20 ng/mL bFGF+5 mg/mL treated human serum albumin.

[0215] For the preparation of the these variants, the treated human serum albumin was treated by addition of 32 mM sodium octanoate, followed by heating at 60C for 4 h, followed by treatment with ion-exchange resin (AG501-X8(D)) for 6 h at room temperature, followed by treatment with dextran-coated activated charcoal (C6241, Sigma-Aldrich Co. LLC.) overnight at room temperature, followed by centrifugation, filtering, adjustment to a 10% solution with nuclease-free water, followed by addition to the other components of the medium. For certain experiments in which the medium was conditioned, the medium was conditioned for 24 h on irradiated human neonatal fibroblast feeders. The cells were plated on fibronectin-coated plates or fibronectin and vitronectin-coated plates, unless otherwise noted.

[0216] The formulation of the medium can be adjusted to meet the needs of the specific cell types being cultured. Furthermore, in certain situations, treated human serum albumin can be replaced with other treated albumin, for example, treated bovine serum albumin, other glutamine sources can be used instead of or in addition to L-alanyl-L-glutamine, for example, L-glutamine, other buffering systems can be used instead of or in addition to HEPES, for example, phosphate, bicarbonate, etc., selenium can be provided in other forms instead of or in addition to sodium selenite, for example, selenous acid, other antioxidants can be used instead of or in addition to L-ascorbic acid 2-phosphate sesquimagnesium salt hydrate and/or D-alpha-tocopherol acetate, for example, L-ascorbic acid, other surfactants can be used instead of or in addition to polyoxyethylenesorbitan monooleate and/or Pluronic F-68, for example, Pluronic F-127, other basal media can be used instead of or in addition to DMEM/F12, for example, MEM, DMEM, etc., and the components of the culture medium can be varied with time, for example, by using a medium without TGF-β from day 0 to day 5, and then using a medium containing 2 ng/mL TGF-β after day 5. In certain situations, other ingredients can be added, for example, fatty acids, lysophosphatidic acid, lysosphingomyelin, sphingosine-1-phosphate, other sphingolipids, members of the TGF-β/NODAL family of proteins, IL-6, members of the Wnt family of proteins, etc., at appropriate concentrations, and ingredients that are known to promote or inhibit the growth of specific cell types and/or agonists and/or antagonists of proteins or other molecules that are known to promote or inhibit the growth of specific cell types can be added to the medium at appropriate concentrations when it is used with those cell types, for example, sphingosine-1-phosphate and pluripotent stem cells. Ingredients can take the form of purified compounds, parts of well-defined mixtures, parts of complex or undefined mixtures, for example, animal or plant oils, and may be added by biological processes, for example, conditioning. The concentrations of the components can be varied from the listed values within ranges that will be obvious to persons skilled in the art.

### Example 6

### Transfection of Cells with Synthetic RNA

[0217] For transfection in 6-well plates, 2 μg RNA and 6 μL transfection reagent (Lipofectamine™ RNAiMAX, Life Technologies Corporation) were first diluted separately in complexation medium (Opti-MEM®, Life Technologies Corporation) to a total volume of 60 μL each. Diluted RNA and transfection reagent were then mixed and incubated for 15 min at room temperature, according to the transfection reagent-manufacturer's instructions. Complexes were then added to cells in culture. Between 30 μL and 240 μL of complexes were added to each well of a 6-well plate, which already contained 2 mL of transfection medium per well. Plates were then shaken gently to distribute the complexes throughout the well. Cells were incubated with complexes for 2 hours to overnight, before replacing the medium with fresh transfection medium (2 mL/well). Volumes were scaled for transfection in 24-well and 96-well plates. Cells were fixed and stained 20-24 h after transfection using an antibody against Oct4. Nuclei were stained and counted to determine the relative toxicity of the RNA.

### Example 7

### Analysis of the Ability of Untreated Human Serum Albumin Preparations to Support Nucleic Acid Transfection and RNA Reprogramming

[0218] Primary human neonatal fibroblasts were cultured in medium with or without 5 mg/mL HSA. Cohn Fraction V (A6784, Sigma-Aldrich Co. LLC.), and four different recombinant HSA preparations (A6608, A7736, A9731, and A9986, all from Sigma-Aldrich Co. LLC.) were screened. Cells were transfected according to Example 2, with RNA synthesized according to Example 1. While untransfected cells grew well in media containing any of the HSA preparations, in transfected wells, each of the HSA preparations yielded dramatically different cell morphologies and cell densities, and none resulted in morphological changes indicative of reprogramming.

### Example 8

### Production of Octanoate-Treated Human Serum Albumin

[0219] A 10% solution of HSA was pre-incubated with 22 mM sodium chloride and 16 mM sodium octanoate (Sigma-Aldrich Co. LLC), and was incubated at 37 C for 3 hours before assembly of the complete medium.

### Example 9

### Treatment of Human Serum Albumin Using Ion-Exchange Chromatography

[0220] A 20% solution of recombinant HSA produced in Pichia pastoris (A7736, Sigma-Aldrich Co. LLC.) was prepared by dissolving 2 g of HSA in 10 mL of nuclease-free water with gentle agitation at room temperature. The HSA solution was then deionized by first adding 1 g of mixed-bed deionizing resin (AG 501-X8(D), Bio-Rad Laboratories, Inc.), and rocking for 1 h at room temperature. The HSA solution was then decanted into a tube containing 5 g of fresh resin, and was rocked for 4 h at room temperature. Finally, the deionized HSA solution was decanted, adjusted to a 10% total protein content with nuclease-free water, filter-sterilized using a 0.2 μm PES-membrane filter, and stored at 4 C.

### Example 10

### Analysis of Transfection Efficiency and Viability of Cells Cultured in Media Containing Octanoate-Treated Human Serum Albumin

[0221] Primary human neonatal fibroblasts were cultured in media containing recombinant HSA treated according to Example 8 and/or Example 9 or containing treated blood-derived HSA (Bio-Pure HSA, Biological Industries). Cells were transfected daily, according to Example 2, with RNA synthesized according to Example 1, beginning on day 0. Pictures were taken on day 3. Several small areas of cells undergoing morphological changes resembling mesenchymal to epithelial transition were observed in the wells containing octanoate, indicating an increased transfection efficiency. Many large areas of morphological changes resembling mesenchymal to epithelial transition were observed in the samples containing the treated blood-derived HSA. In both cases, the morphological changes were characteristic of reprogramming.

### Example 11

### Reprogramming Human Fibroblasts Using Media Containing Octanoate-Treated Human Serum Albumin

[0222] Primary human neonatal fibroblasts were plated in 6-well plates at a density of 5000 cells/well in fibroblast medium (DMEM+10% fetal bovine serum). After 6 hours, the medium was replaced with transfection medium containing octanoate-treated HSA. The cells were transfected daily, according to Example 2, with RNA synthesized according to Example 1, beginning on day 0. By day 5, the well contained several areas of cells exhibiting morphology consistent with reprogramming. This experiment did not include the use of feeders or immunosuppressants.

### Example 12

### Analysis of Transfection Efficiency and Viability of Cells Cultured in Media Containing Ion-Exchange-Resin-Treated Human Serum Albumin

[0223] Primary human neonatal fibroblasts were transfected according to Example 2, with RNA synthesized according to Example 1, beginning on day 0. Pictures were taken on day 2. Cells in the well containing untreated HSA exhibited low viability compared to either the well containing treated blood-derived HSA or ion-exchange-resin-treated recombinant HSA.

### Example 13

### Reprogramming Human Fibroblasts Using Ion-Exchange-Resin-Treated Human Serum Albumin

[0224] Primary human neonatal fibroblasts were plated in 6-well plates on feeders at a density of 10,000 cells/well in fibroblast medium (DMEM+10% fetal bovine serum). The cells were transfected daily according to Example 2, with RNA synthesized according to Example 1, beginning on day 0. A passage with a split ratio of 1:20 was performed on day 4. Pictures were taken on day 10. The well contained many large colonies of cells exhibiting morphology consistent with reprogramming. No colonies were observed in wells exposed to cell-culture media containing untreated HSA.

### Example 14

### Reprogramming Human Fibroblasts without Using Feeders or Immunosuppressants

[0225] Primary human fibroblasts were plated in 6-well plates at a density of 20,000 cells/well in fibroblast medium (DMEM+10% fetal bovine serum). After 6 hours, the medium was replaced with transfection medium containing treated HSA and not containing immunosuppressants, and the cells were transfected daily according to Example 2, with RNA synthesized according to Example 1, except that the dose of RNA was reduced to 1 μg/well and a total of 5 transfections were performed. Pictures were taken on day 7. Small colonies of cells exhibiting morphology consistent with reprogramming became visible as early as day 5. On day 7, the medium was replaced with DMEM/F12+20% Knockout™ Serum Replacement (Life Technologies Corporation)+1× non-essential amino acids+2 mM L-glutamine, conditioned on irradiated mouse embryonic fibroblasts for 24 hours, and then supplemented with 20 ng/mL bFGF and 10 μM Y-27632. Large colonies with a reprogrammed morphology became visible as early as day 8. Colonies were picked on day 10, and plated in wells coated with basement membrane extract (Cultrex® Human BME Pathclear®, Trevigen Inc.). Cells grew rapidly, and were passaged to establish lines. Established lines stained positive for the pluripotent stem-cell markers Oct4 and SSEA4. The entire protocol was repeated, and similar results were obtained.

### Example 15

### Efficient, Rapid Derivation and Reprogramming of Cells from Human Skin Biopsy Tissue

[0226] A full-thickness dermal punch biopsy was performed on a healthy, 31 year-old volunteer, according to an approved protocol. Briefly, an area of skin on the left, upper arm was anesthetized by topical application of 2.5% lidocaine. The field was disinfected with 70% isopropanol, and a full-thickness dermal biopsy was performed using a 1.5 mm-diameter punch. The tissue was rinsed in phosphate-buffered saline (PBS), and was placed in a 1.5 mL tube containing 250 μL of TrypLE™ Select CTS™ (Life Technologies Corporation), and incubated at 37 C for 30 min. The tissue was then transferred to a 1.5 mL tube containing 250 μL of DMEM/F12-CTS™ (Life Technologies Corporation)+5 mg/mL collagenase, and incubated at 37 C for 2 h. The epidermis was removed using forceps, and the tissue was mechanically dissociated. Cells were rinsed twice in DMEM/F12-CTS™ and were plated in fibronectin-coated wells of 24-well and 96-well plates. Phlebotomy was also performed on the same volunteer, and venous blood was collected in Vacutainer® SST™ tubes (Becton, Dickinson and Company). Serum was isolated according to the manufacturer's protocol. Isogenic plating medium was prepared by mixing DMEM/F12-CTS™+2 mM L-alanyl-L-glutamine (Sigma-Aldrich Co. LLC.)+20% human serum. Cells from the dermal tissue sample were plated either in transfection medium or in isogenic plating medium. After 2 days, the wells were rinsed, and the medium was replaced with transfection medium. Many cells with a fibroblast morphology attached and began to spread by day 2. Cells were transfected according to Example 2, with RNA synthesized according to Example 1, beginning on day 2, with all volumes scaled to accommodate the smaller wells. By day 5, areas of cells with morphologies consistent with reprogramming were observed.

### Example 16

### Reprogramming Human Fibroblasts Using Synthetic RNA Containing Non-Canonical Nucleotides

[0227] Primary human fibroblasts were plated in 6-well plates coated with recombinant human fibronectin and recombinant human vitronectin (each diluted in DMEM/F12 to a concentration of 1 μg/mL, 1 mL/well, incubated at room temperature for 1 h) at a density of 20,000 cells/well in transfection medium. The following day, the cells were transfected as in Example 2, with RNA synthesized according to Example 1, except that the dose of RNA was 0.5 μg/well on day 1, 0.5 μg/well on day 2, and 2 μg/well on day 3. Pictures were taken on day 4. Small colonies of cells exhibiting morphology consistent with reprogramming were visible on day 4.

### Example 17

### Reprogramming Human Fibroblasts with a Non-Conditioned Transfection Medium

[0228] Primary human fibroblasts were plated in 6-well plates coated with recombinant human fibronectin and recombinant human vitronectin (each diluted in DMEM/F12 to a concentration of 1 μg/mL, 1 mL/well, incubated at room temperature for 1 h) at a density of 20,000 cells/well in transfection medium. The following day, the cells were transfected as in Example 2, with RNA synthesized according to Example 1, except that the dose of RNA was 0.5 μg/well on day 1, 0.5 μg/well on day 2, 2 μg/well on day 3, 2 μg/well on day 4, and 4 μg/well on day 5. Small colonies of cells exhibiting morphology consistent with reprogramming became visible as early as day 5. On day 7, the medium was replaced with DMEM/F12+20% Knockout™ Serum Replacement (Life Technologies Corporation)+1× non-essential amino acids+2 mM L-glutamine, conditioned on irradiated mouse embryonic fibroblasts for 24 hours, and then supplemented with 20 ng/mL bFGF and 10 μM Y-27632. Large colonies with a reprogrammed morphology became visible as early as day 8. Colonies were picked on day 10, and plated in wells coated with basement membrane extract (Cultrex® Human BME Pathclear®, Trevigen Inc.). Cells grew rapidly, and were passaged to establish lines.

### Example 18

### Reprogramming Human Fibroblasts Using Synthetic RNA Containing Non-Canonical Nucleotides

[0229] Primary human neonatal fibroblasts were plated in 6-well plates coated with recombinant human fibronectin and recombinant human vitronectin (each diluted in DMEM/F12 to a concentration of 1 μg/mL, 1 mL/well, and incubated at room temperature for 1 h) at a density of 10,000 cells/well in transfection medium. The following day, the cells were transfected as in Example 2, using RNA containing A, 0.5 7 dG, 0.5 5 mU, and 5 mC, and an RNA dose of 0.5 μg/well on day 1, 0.5 μg/well on day 2, 2 μg/well on day 3, 2 μg/well on day 4, and 4 μg/well on day 5. Small colonies of cells exhibiting morphology consistent with reprogramming became visible as early as day 5. The medium was replaced with maintenance medium on day 6. Cells were stained using an antibody against Oct4. Oct4-positive colonies of cells exhibiting a morphology consistent with reprogramming were visible throughout the well.

### Example 19

### Feeder-Free, Passage-Free, Immunosuppressant-Free, Conditioning-Free Reprograming of Primary Adult Human Fibroblasts Using Synthetic RNA

[0230] Wells of a 6-well plate were coated with a mixture of recombinant human fibronectin and recombinant human vitronectin (1 μg/mL in DMEM/F12, 1 mL/well) for 1 h at room temperature. Primary adult human fibroblasts were plated in the coated wells in transfection medium at a density of 10,000 cells/well. Cells were maintained at 37 C, 5% CO₂, and 5% 02. Beginning the following day, cells were transfected according to Example 2 daily for 5 days with RNA synthesized according to Example 1. The total amount of RNA transfected on each of the 5 days was 0.5 μg, 0.5 μg, 2 μg, 2 μg, and 4 μg, respectively. Beginning with the fourth transfection, the medium was replaced twice a day. On the day following the final transfection, the medium was replaced with transfection medium, supplemented with 10 μM Y-27632. Alternatively, the total amount of RNA transfected on each day was 0.25 μg, 0, 0.5 μg, 0.5 μg, and 0.5 μg, respectively or 0.25 μg, 0, 0.25 μg, 0.25 μg, 0.25 μg, and 0.25 μg, respectively. In certain experiments, transfection medium was changed only once per day, at the time of transfection. Compact colonies of cells with a reprogrammed morphology were visible in each transfected well by day 4.

### Example 20

### Efficient, Rapid Derivation and Reprogramming of Cells from Adult Human Skin Biopsy Tissue

[0231] A full-thickness dermal punch biopsy was performed on a healthy, 31 year-old volunteer, according to an approved protocol. Briefly, an area of skin on the left, upper arm was anesthetized by topical application of 2.5% lidocaine. The field was disinfected with 70% isopropanol, and a full-thickness dermal biopsy was performed using a 1.5 mm-diameter punch. The tissue was rinsed in phosphate-buffered saline (PBS), was placed in a 1.5 mL tube containing 250 μL of TrypLE Select CTS (Life Technologies Corporation), and was incubated at 37 C for 30 min. The tissue was then transferred to a 1.5 mL tube containing 250 μL of DMEM/F12-CTS (Life Technologies Corporation)+5 mg/mL collagenase, and was incubated at 37 C for 2 h. The epidermis was removed using forceps, and the tissue was mechanically dissociated. Cells were rinsed twice in DMEM/F12-CTS. Phlebotomy was also performed on the same volunteer, and venous blood was collected in Vacutainer SST tubes (Becton, Dickinson and Company). Serum was isolated according to the manufacturer's instructions. Isogenic plating medium was prepared by mixing DMEM/F12-CTS+2 mM L-alanyl-L-glutamine (Sigma-Aldrich Co. LLC.)+20% human serum. Cells from the dermal tissue sample were plated in a fibronectin-coated well of a 6-well plate in isogenic plating medium. Many cells with a fibroblast morphology attached and began to spread by day 2. Cells were expanded and frozen in Synth-a-Freeze (Life Technologies Corporation).

[0232] Cells were passaged into 6-well plates at a density of 5,000 cells/well. The following day, the medium was replaced with transfection medium, and the cells were transfected as in Example 2, using RNA containing A, 0.5 7 dG, 0.4 5 mU, and 5 mC, and an RNA dose of 0.5 μg/well on day 1, 0.5 μg/well on day 2, 2 μg/well on day 3, 2 μg/well on day 4, and 2 μg/well on day 5. Certain wells received additional 2 μg/well transfections on day 6 and day 7. In addition, certain wells received 2 ng/mL TGF-β1 from day 4 onward. The medium was replaced with maintenance medium on day 6. Colonies of cells exhibiting morphology consistent with reprogramming became visible between day 5 and day 10. Colonies grew rapidly, and many exhibited a morphology similar to that of embryonic stem-cell colonies. Colonies were picked and plated in wells coated with recombinant human fibronectin and recombinant human vitronectin (each diluted in DMEM/F12 to a concentration of 1 μg/mL, 1 mL/well, incubated at room temperature for 1 h). Cells grew rapidly, and were passaged to establish lines.

### Example 21

### High-Efficiency Gene Editing by Repeated Transfection with RiboSlice

[0233] Primary human fibroblasts were plated as in Example 19. The following day, the cells were transfected as in Example 2 with RNA synthesized according to Example 1. The following day cells in one of the wells were transfected a second time. Two days after the second transfection, the efficiency of gene editing was measured using a mutation-specific nuclease assay.

### Example 22

### Transfection of Cells with Synthetic RNA Containing Non-Canonical Nucleotides and DNA Encoding a Repair Template

[0234] For transfection in 6-well plates, 1 μg RNA encoding gene-editing proteins targeting exon 16 of the human APP gene, 1 μg single-stranded repair template DNA containing a Pstl restriction site that was not present in the target cells, and 6 μL transfection reagent (Lipofectamine RNAiMAX, Life Technologies Corporation) were first diluted separately in complexation medium (Opti-MEM, Life Technologies Corporation) to a total volume of 120 μL. Diluted RNA, repair template, and transfection reagent were then mixed and incubated for 15 min at room temperature, according to the transfection reagent-manufacturer's instructions. Complexes were added to cells in culture. Approximately 120 μL of complexes were added to each well of a 6-well plate, which already contained 2 mL of transfection medium per well. Plates were shaken gently to distribute the complexes throughout the well. Cells were incubated with complexes for 4 hours to overnight, before replacing the medium with fresh transfection medium (2 mL/well). The next day, the medium was changed to DMEM+10% FBS. Two days after transfection, genomic DNA was isolated and purified. A region within the APP gene was amplified by PCR, and the amplified product was digested with Pstl and analyzed by gel electrophoresis.

### Example 23

### In Vivo RiboSlice Safety Study

[0235] 40 female NCr nu/nu mice were injected subcutaneously with 5×10⁶ MDA-MB-231 tumor cells in 50% Matrigel (BD Biosciences). Cell injection volume was 0.2 mL/mouse. The age of the mice at the start of the study was 8 to 12 weeks. A pair match was conducted, and animals were divided into 4 groups of 10 animals each when the tumors reached an average size of 100-150 mm³, and treatment was begun. Body weight was measured every day for the first 5 days, and then biweekly to the end of the study. Treatment consisted of RiboSlice BIRC5-1.2 complexed with a vehicle (Lipofectamine 2000, Life Technologies Corporation). To prepare the dosing solution for each group, 308 μL of complexation buffer (Opti-MEM, Life Technologies Corporation) was pipetted into each of two sterile, RNase-free 1.5 mL tubes. 22 μL of RiboSlice BIRC5-1.2 (500 ng/μL) was added to one of the two tubes, and the contents of the tube were mixed by pipetting. 22 μL of vehicle was added to the second tube. The contents of the second tube were mixed, and then transferred to the first tube, and mixed with the contents of the first tube by pipetting to form complexes. Complexes were incubated at room temperature for 10 min. During the incubation, syringes were loaded. Animals were injected either intravenously or intratumorally with a total dose of 1 μg RNA/animal in 60 μL total volume/animal. A total of 5 treatments were given, with injections performed every other day. Doses were not adjusted for body weight. Animals were followed for 17 days. No significant reduction in mean body weight was observed, demonstrating the in vivo safety of RiboSlice gene-editing RNA.

### Example 24

### Screening of Reagents for Delivery of Nucleic Acids to Cells

[0236] Delivery reagents including polyethyleneimine (PEI), various commercial lipid-based transfection reagents, a peptide-based transfection reagent (N-TER, Sigma-Aldrich Co. LLC.), and several lipid-based and sterol-based delivery reagents were screened for transfection efficiency and toxicity in vitro. Delivery reagents were complexed with RiboSlice BIRC5-1.2, and complexes were delivered to HeLa cells in culture. Toxicity was assessed by analyzing cell density 24 h after transfection. Transfection efficiency was assessed by analyzing morphological changes. The tested reagents exhibited a wide range of toxicities and transfection efficiencies. Reagents containing a higher proportion of ester bonds exhibited lower toxicities than reagents containing a lower proportion of ester bonds or no ester bonds.

### Example 25

### High-Concentration Liposomal RiboSlice

[0237] High-Concentration Liposomal RiboSlice was prepared by mixing 1 μg RNA at 500 ng/μL with 3 μL of complexation medium (Opti-MEM, Life Technologies Corporation), and 2.5 μL of transfection reagent (Lipofectamine 2000, Life Technologies Corporation) per μg of RNA with 2.5 μL of complexation medium. Diluted RNA and transfection reagent were then mixed and incubated for 10 min at room temperature to form High-Concentration Liposomal RiboSlice. Alternatively, a transfection reagent containing DOSPA or DOSPER is used.

### Example 26

### In Vivo RiboSlice Efficacy Study—Subcutaneous Glioma Model

[0238] 40 female NCr nu/nu mice were injected subcutaneously with 1×10⁷ U-251 tumor cells. Cell injection volume was 0.2 mL/mouse. The age of the mice at the start of the study was 8 to 12 weeks. A pair match was conducted, and animals were divided into 4 groups of 10 animals each when the tumors reached an average size of 35-50 mm³, and treatment was begun. Body weight was measured every day for the first 5 days, and then biweekly to the end of the study. Caliper measurements were made biweekly, and tumor size was calculated. Treatment consisted of RiboSlice BIRC5-2.1 complexed with a vehicle (Lipofectamine 2000, Life Technologies Corporation). To prepare the dosing solution, 294 μL of complexation buffer (Opti-MEM, Life Technologies Corporation) was pipetted into a tube containing 196 μL of RiboSlice BIRC5-1.2 (500 ng/μL), and the contents of the tube were mixed by pipetting. 245 μL of complexation buffer was pipetted into a tube containing 245 μL of vehicle. The contents of the second tube were mixed, and then transferred to the first tube, and mixed with the contents of the first tube by pipetting to form complexes. Complexes were incubated at room temperature for 10 min. During the incubation, syringes were loaded. Animals were injected intratumorally with a total dose of either 2 μg or 5 μg RNA/animal in either 20μL or 50 μL total volume/animal. A total of 5 treatments were given, with injections performed every other day. Doses were not adjusted for body weight. Animals were followed for 25 days.

### Example 27

### Liposome Formulation and Nucleic-Acid Encapsulation

[0239] Liposomes are prepared using the following formulation: 3.2 mg/mL N-(carbonyl-ethoxypolyethylene glycol 2000)-1,2-distearoyl-sn-glycero-3-phosphoethanolamine (MPEG2000-DSPE), 9.6 mg/mL fully hydrogenated phosphatidylcholine, 3.2 mg/mL cholesterol, 2 mg/mL ammonium sulfate, and histidine as a buffer. pH is controlled using sodium hydroxide and isotonicity is maintained using sucrose. To form liposomes, lipids are mixed in an organic solvent, dried, hydrated with agitation, and sized by extrusion through a polycarbonate filter with a mean pore size of 800 nm. Nucleic acids are encapsulated by combining 10 μg of the liposome formulation per 1 μg of nucleic acid and incubating at room temperature for 5 minutes.

### Example 28

### Folate-Targeted Liposome Formulation

[0240] Liposomes are prepared according to Example 62, except that 0.27 mg/mL 1,2-distearoyl-sn-glycero-3-phosphoethanolamine-N-[folate(polyethylene glycol)-5000] (FA-MPEG5000-DSPE) is added to the lipid mixture.

### Example 29

### Therapy Comprising Liposomal Protein-Encoding RNA

[0241] Liposomes encapsulating synthetic RNA encoding a therapeutic protein, synthesized according to Example 1, are prepared according to Example 27 or Example 28. The liposomes are administered by injection or intravenous infusion.

### Example 30

### Generation of Elastin ivT-RNA Template

[0242] Total RNA was extracted from neonatal human dermal fibroblasts using the RNeasy mini kit (QIAGEN GmbH), according to the manufacturer's instructions. cDNA encoding human elastin was prepared using MonsterScript™ Reverse Transcriptase (Epicentre Biotechnologies) and the primer: AAAAAAACCGGT TCATTTTCTCTTCCGGCCAC. An in vitro transcription (ivT) template was prepared from the cDNA by PCR amplification of the elastin coding sequence (CDS) using the primers: F: AAAAAAGCTAGCATGGCGGGTCTGACG, and R: AAAAAAACCGGTTCATTTTCTCTTCCGGCCAC. The PCR product was then purified using agarose gel electrophoresis and the QlAquick Gel Extraction Kit (QIAGEN GmbH) and was cloned into a vector containing the human beta globin (HBB) 5′ and 3′ untranslated regions and a strong Kozak sequence. The vector was amplified, purified, and linearized prior to RNA synthesis.

### Example 31

### Synthesis of Elastin RNA

[0243] RNA encoding human elastin was synthesized using the DNA template of Example 30 and the T7 High Yield RNA Synthesis Kit (New England Biolabs, Inc.), according to the manufacturer's instructions (Table 4). Samples of the RNA were analyzed by agarose gel electrophoresis to assess the quality of the RNA (FIG. 1). The RNA was then diluted to 200 ng/μL and an RNase inhibitor (Superase•In™, Life Technologies Corporation) was added at a concentration of 1 μL/200 μg of RNA. The RNA solution was stored at 4 C.

### Example 32

### Production of Octanoate-Treated Human Serum Albumin

[0244] A 10% solution of HSA was pre-incubated with 16 mM sodium octanoate (Sigma-Aldrich Co. LLC), and was incubated at 37 C for 3 hours before assembly of the complete medium.

### Example 33

### Formulation for In Vivo Delivery of Nucleic Acids

[0245] The formulation for in vivo delivery of nucleic acids is prepared by combining RNA synthesized according to Example 31 and human serum albumin treated according to Examples 8, 9 and/or 32 in a suitable buffer (e.g., water, DMEM/F12, complexation medium, Opti-MEM, etc.).

### Example 34

### Increasing Elastin Production in Skin by Transdermal Injection Via Syringe of Treated Albumin and RNA Encoding Elastin

[0246] The formulation of example 33 is loaded into an insulin syringe with a 28-gauge 0.5-inch needle and delivered to the dermis of a patient through the epidermis. Additional doses are administered as necessary.

### Example 35

### Increasing Elastin Production in Skin by Intradermal Injection Via Motorized Microneedle Array of Treated Albumin and RNA Encoding Elastin

[0247] The formulation of example 33 is loaded into the chamber of a motorized microneedle array set to a penetration depth of approximately 0.1 mm. The microneedle array delivers the formulation to the dermis of a patient through the epidermis.

### Example 36

### Increasing Collagen Production in Skin by Transdermal Injection of Treated Albumin and RNA Encoding Collagen

[0248] The formulation of example 33 is prepared using RNA encoding human collagen type I and/or type III. The formulation is delivered as in Example 34 or 35.

### Example 37

### Increasing Production of Actin in Skeletal Muscle by Intramuscular Injection of Treated Albumin and RNA Encoding Actin

[0249] The formulation of example 33 is prepared using RNA encoding skeletal alpha actin. The formulation is delivered to the patient via intramuscular injection.

### Example 38

### Wound Healing Treatment

[0250] The formulation of example 33 is prepared using RNA encoding basic fibroblast growth factor. The formulation is delivered as in Example 34 or 35.

### Example 39

### Anti-Scarring Treatment

[0251] The formulation of example 33 is prepared using RNA encoding collagenase. The formulation is delivered as in Example 34 or 35.

### Example 40

### Generation of Tyrosinase ivT-RNA Template

[0252] Total RNA was extracted from human epidermal melanocytes using the RNeasy mini kit (QIAGEN GmbH), according to the manufacturer's instructions. cDNA encoding human tyrosinase was prepared using MonsterScript™ Reverse Transcriptase (Epicentre Biotechnologies). An in vitro transcription (ivT) template was prepared from the cDNA by PCR amplification of the tyrosinase coding sequence (CDS). The PCR product was then purified using agarose gel electrophoresis and the QIAquick Gel Extraction Kit (QIAGEN GmbH) and was cloned into a vector containing the human beta globin (HBB) 5′ and 3′ untranslated regions and a strong Kozak sequence. The vector was amplified, purified, and linearized prior to RNA synthesis.

### Example 41

### Synthesis of Tyrosinase RNA

[0253] RNA encoding human tyrosinase was synthesized according to Example 1, using the DNA template of Example 40 and the T7 High Yield RNA Synthesis Kit (New England Biolabs, Inc.), according to the manufacturer's instructions (Table 4). Samples of the RNA were analyzed by agarose gel electrophoresis to assess the quality of the RNA. The RNA was then diluted to 1 μg/μL. The RNA solution was stored at 4 C.

### Example 42

### Production of Octanoate-Treated Human Serum Albumin

[0254] A 10% solution of HSA was pre-incubated with 16 mM sodium octanoate (Sigma-Aldrich Co. LLC), and was incubated at 37 C for 3 hours before assembly of the complete medium.

### Example 43

### Increasing Melanin Production in Skin by Transdermal Injection Via Syringe of RNA Encoding Tyrosinase

[0255] The RNA of Example 41 was loaded into a syringe and delivered to the dermis of the ventral forearm of a healthy 33 year-old male patient over the course of approximately 30 seconds.

### Example 44

### Increasing Melanin Production in Skin by Combined Delivery of RNA Encoding Tyrosinase and Electroporation

[0256] The area of skin treated in Example 43 was exposed to electrical pulses of between 10V and 155V and between approximately 10 milliseconds and approximately 1 second using a two-electrode array electrically connected to a capacitor. The patient reported a tingling sensation at all voltages and penetration depths. The treated area became darker after 24-48 hours (see FIG. 16). The experiment was repeated several times, with similar results.

### Example 45

### Increasing Melanin Production in Skin by Topical or Intradermal Application of RNA Encoding Tyrosinase

[0257] The RNA of Example 41 or the liposomes of Example 29 are applied directly to the skin, with or without disruption of the stratum corneum or injected intradermally using a dose of one microgram or less per square centimeter. Optionally, an electric field is applied as in Example 44 or using a surface-contact patch to enhance delivery of the RNA.

### Example 46

### Increasing Elastin Production in Skin by Transdermal Delivery of RNA Encoding Elastin

[0258] RNA encoding elastin was prepared according to Example 1. The RNA is delivered as in Example 43, 44 or 45.

### Example 47

### Increasing Collagen Production in Skin by Transdermal Delivery of RNA Encoding Collagen

[0259] RNA encoding collagen was prepared according to Example 1. The RNA is delivered as in Example 43, 44 or 45.

### Example 48

### Anemia Therapy Comprising Delivery of RNA Encoding Erythropoietin or Darbepoetin

[0260] RNA encoding darbepoetin alfa was prepared according to Example 1. The RNA is delivered as in Example 43, 44 or 45.

### Example 49

### Increasing Production of Actin in Skeletal Muscle by Intramuscular Delivery of RNA Encoding Actin

[0261] RNA encoding actin is prepared according to Example 1. The RNA is delivered to the patient via intramuscular injection with or without the use of an electric field as in Example 43, 44 or 45.

### Example 50

### Wound Healing Treatment

[0262] RNA encoding basic fibroblast growth factor is prepared according to Example 1. The RNA is delivered as in Example 43, 44 or 45.

### Example 51

### Anti-Scarring Treatment

[0263] RNA encoding collagenase is prepared according to Example 1. The RNA is delivered as in Example 43, 44 or 45.

### Example 52

### Production of Botulinum Toxin

[0264] RNA encoding botulinum toxin is prepared according to Example 1. The RNA is delivered as in Example 43, 44 or 45.

### Example 53

### Increasing Collagen Production in Skin Cells by Transfection with RNA Encoding Collagen I

[0265] RNA comprising the coding sequence of the human COL1A1 gene was synthesized according to Example 1. Primary human dermal fibroblasts were plated in wells of a 24-well plate, and were transfected according to Example 2. Between 24 and 72 hours after transfection, the cells were fixed and stained using an antibody targeting collagen I. Many extracellular deposits of collagen were visible in the transfected wells (FIG. 17).

### Example 54

### Increasing Collagen Production in Skin Cells by Transfection with RNA Encoding Collagen VII

[0266] RNA comprising the coding sequence of the human COL7 gene was synthesized according to Example 1. Primary human dermal fibroblasts were plated in wells of a 24-well plate, and were transfected according to Example 2. Between 24 and 72 hours after transfection, the cells were fixed and stained using an antibody targeting collagen VII. Transfected cells exhibited high levels of collagen VII, compared to an un-transfected control (FIG. 18).

### Example 55

### Increasing Collagen Production in Skin by Transdermal Injection via Syringe of RNA Encoding Collagen I or Collagen VII

[0267] RNA comprising the coding sequence of the human COL1A1 gene or the human COL7 gene was synthesized according to Example 1. The RNA is loaded into a syringe and delivered to the dermis of a patient over the course of approximately 30 seconds or as in Example 43, 44 or 45.

### Example 56

### Increasing Collagen Production in Skin by Combined Delivery of RNA Encoding Collagen I or Collagen VII and Electroporation

[0268] The area of skin treated in Example 55 is exposed to electrical pulses of between 10V and 155V and between approximately 50 microseconds and approximately 1 second using a multi-electrode array electrically connected to a power source.

### EQUIVALENTS

[0269] Those skilled in the art will recognize, or be able to ascertain, using no more than routine experimentation, numerous equivalents to the specific embodiments described specifically herein. Such equivalents are intended to be encompassed in the scope of the following claims.

### INCORPORATION BY REFERENCE

[0270] All patents and publications referenced herein are hereby incorporated by reference in their entireties.

1.-9. (canceled)

10. A method for treating a dystrophic epidermolysis bullosa patient comprising delivering to a dystrophic epidermolysis bullosa patient, in vivo or ex vivo, synthetic RNA encoding collagen type VII, to result in the amelioration of one or more of the dystrophic epidermolysis bullosa patient's symptoms.

11. A method for treating a dystrophic epidermolysis bullosa patient comprising delivering to a dystrophic epidermolysis bullosa patient, in vivo or ex vivo, synthetic RNA encoding a gene-editing protein that targets the COL7 gene, to result in the amelioration of one or more of the dystrophic epidermolysis bullosa patient's symptoms.

12.-202. (canceled)

203. The method of claim 10, wherein the synthetic RNA is delivered to the patient's skin.

204. The method of claim 203, wherein the synthetic RNA is delivered to the patient's skin by transdermal injection.

205. The method of claim 10, further comprising exposing the patient's skin to electrical pulses.

206. The method of claim 205, wherein the electrical pulses are between about 10V and about 155V.

207. The method of claim 205, wherein the electrical pulses are between about 50 microseconds and about 1 second.

208. The method of claim 10, wherein the synthetic RNA is delivered to the patient's skin cells.

209. The method of claim 208, wherein the skin cells are fibroblasts.

210. The method of claim 10, wherein the synthetic RNA comprises a non-canonical nucleotide selected from the group consisting of 5-methyluridine, 5-hydroxyuridine, pseudouridine, 5-methylpseudouridine, 5-hydroxypseudouridine, 5-methylcytidine, and 5-hydroxycytidine.

211. The method of claim 210, wherein the synthetic RNA comprises 5-hydroxymethylcytidine.

212. The method of claim 210, wherein the synthetic RNA comprises 5-methyluridine at about 40% of the uridine residues.

213. The method of claim 10, wherein the collagen type VII is collagen type VII (A1).

214. The method of claim 10, wherein the synthetic RNA encodes the amino acid sequence of SEQ ID NO: 78.

215. The method of claim 10, further resulting in increased expression of collagen type VII within between about 24 and about 72 hours of delivery.

216. The method of claim 10, wherein the synthetic RNA encodes the coding sequence of the human COL7 gene.

217. The method of claim 11, wherein the synthetic RNA is delivered to the patient's skin.

218. The method of claim 11, wherein the gene-editing protein corrects or eliminates, either alone or in combination with one or more other molecules or gene-editing proteins, a mutation that is at least partially responsible for a disease phenotype.

219. The method of claim 11, wherein the synthetic RNA is delivered to the patient's skin cells.

220. The method of claim 219, wherein the skin cells are fibroblasts.

221. The method of claim 11, wherein the synthetic RNA comprises a non-canonical nucleotide selected from the group consisting of 5-methyluridine, 5-hydroxyuridine, pseudouridine, 5-methylpseudouridine, 5-hydroxypseudouridine, 5-methylcytidine, and 5-hydroxycytidine.

222. The method of claim 11, further comprising delivering a repair template to the patient.

223. The method of claim 222, wherein the repair template is a single-stranded DNA molecule or a double-stranded DNA molecule.

224. The method of claim 222, wherein the repair template does not contain a binding site of the gene-editing protein.

225. The method of claim 224, wherein the repair template encodes an amino-acid sequence that is encoded by a DNA sequence that comprises a binding site of the gene-editing protein.

226. The method of claim 11, wherein the gene-editing protein targets a nucleic acid sequence that encodes the amino acid sequence of SEQ ID NO: 78.

227. The method of claim 11, wherein the gene-editing protein is selected from the group consisting of a nuclease, a transcription activator-like effector nuclease (TALEN), a zinc-finger nuclease, a meganuclease, a nickase, and a clustered regularly interspaced short palindromic repeat (CRISPR)-associated protein.

228. The method of claim 11, further resulting in editing of the COL7 gene.

The application's sequence listing, which the Patent Office published only in electronic form, follows.

SEQUENCE LISTING (163 sequences)

SEQ ID NO: 1 - protein, 195 aa, Homo sapiens
VLEKSDIEKFKNQLRTELTNIDHSYLKGIDIASKKKTSNVENTEFEAISTKIFTDELGFSGKHLGGSNKPDGLLWDDDCAIILDSKAYSEGFPLTASHTDAMGRYLRQFTERKEEIKPTWWDIAPEHLDNTYFAYVSGSFSGNYKEQLQKFRQDTNHLGGALEFVKLLLLANNYKTQKMSKKEVKKSILDYNISY

SEQ ID NO: 2 - protein, 195 aa, Homo sapiens
VLEKSDIEKFKNQLRTELTNIDHSYLKGIDIASKKKTSNVENTEFEAISTKIFTDELGFSGEHLGGSNKPDGLLWDDDCAIILDSKAYSEGFPLTASHTDAMGRYLRQFTERKEEIKPTWWDIAPEHLDNTYFAYVSGSFSGNYKEQLQKFRQDTNHLGGALEFVKLLLLANNYKTQKMSKKEVKKSILDYNISY

SEQ ID NO: 3 - protein, 195 aa, Homo sapiens
VLEKSDIEKFKNQLRTELTNIDHSYLKGIDIASKPKTSNVENTEFEAISTKIFTDELGFSGKHLGGSNKPDGLLWDDDCAIILDSKAYSEGFPLTASHTDAMGRYLRQFTERKEEIKPTWWDIAPEHLDNTYFAYVSGSFSGNYKEQLQKFRQDTNHLGGALEFVKLLLLANNYKTQKMSKKEVKKSILDYNISY

SEQ ID NO: 4 - protein, 195 aa, Homo sapiens
VLEKSDIEKFKNQLRTELTNIDHSYLKGIDIASKPKTSNVENTEFEAISTKIFTDELGFSGEHLGGSNKPDGLLWDDDCAIILDSKAYSEGFPLTASHTDAMGRYLRQFTERKEEIKPTWWDIAPEHLDNTYFAYVSGSFSGNYKEQLQKFRQDTNHLGGALEFVKLLLLANNYKTQKMSKKEVKKSILDYNISY

SEQ ID NO: 5 - protein, 191 aa, Homo sapiens
VLEKSDIEKFKNQLRTELTNIDHSYLKGIDIASKPVENTEFEAISTKIFTDELGFSGEHLGGSNKPDGLLWDDDCAIILDSKAYSEGFPLTASHTDAMGRYLRQFTERKEEIKPTWWDIAPEHLDNTYFAYVSGSFSGNYKEQLQKFRQDTNHLGGALEFVKLLLLANNYKTQKMSKKEVKKSILDYNISY

SEQ ID NO: 6 - protein, 195 aa, Homo sapiens
VLEKSDIEKFKNQLRTELTNIDHSYLKGIDIASKKKTSNVENTEFEAISTKIFTDELGFSGKHLGGSNKPDGLLWDDDCAIILDSKAYSEGFPLTASHTDAMGRYLRQFTERKEEIKPTWWDIAPEHLDNTYFAYVSGSFSGDYKEQLQKFRQDTNHLGGALEFVKLLLLANNYKTQKMSKKEVKKSILDYNISY

SEQ ID NO: 7 - protein, 195 aa, Homo sapiens
VLEKSDIEKFKNQLRTELTNIDHSYLKGIDIASKKKTSNVENTEFEAISTKIFTDELGFSGKHLGGSNKPDGLLWDDDCAIILDSKAYSEGFPLTASHTDAMGRYLRQFTERKEEIKPTWWDIAPEHLDNTYFAYVSGSFSGDYKEQLQKFRQNTNHLGGALEFVKLLLLANNYKTQKMSKKEVKKSILDYNISY

SEQ ID NO: 8 - protein, 360 aa, Homo sapiens
MAGHLASDFAFSPPPGGGGDGPGGPEPGWVDPRTWLSFQGPPGGPGIGPGVGPGSEVWGIPPCPPPYEFCGGMAYCGPQVGVGLVPQGGLETSQPEGEAGVGVESNSDGASPEPCTVTPGAVKLEKEKLEQNPEESQDIKALQKELEQFAKLLKQKRITLGYTQADVGLTLGVLFGKVFSQTTICRFEALQLSFKNMCKLRPLLQKWVEEADNNENLQEICKAETLVQARKRKRTSIENRVRGNLENLFLQCPKPTLQQISHIAQQLGLEKDVVRVWFCNRRQKGKRSSSDYAQREDFEAAGSPFSGGPVSFPLAPGPHFGTPGYGSPHFTALYSSVPFPEGEAFPPVSVTTLGSPMHSN

SEQ ID NO: 9 - protein, 317 aa, Homo sapiens
MYNMMETELKPPGPQQTSGGGGGNSTAAAAGGNQKNSPDRVKRPMNAFMVWSRGQRRKMAQENPKMHNSEISKRLGAEWKLLSETEKRPFIDEAKRLRALHMKEHPDYKYRPRRKTKTLMKKDKYTLPGGLLAPGGNSMASGVGVGAGLGAGVNQRMDSYAHMNGWSNGSYSMMQDQLGYPQHPGLNAHGAAQMQPMHRYDVSALQYNSMTSSQTYMNGSPTYSMSYSQQGTPGMALGSMGSVVKSEASSSPPVVTSSSHSRAPCQAGDLRDMISMYLPGAEVPEPAAPSRLHMSQHYQSGPVPGTAINGTLPLSHM

SEQ ID NO: 10 - protein, 479 aa, Homo sapiens
MRQPPGESDMAVSDALLPSFSTFASGPAGREKTLRQAGAPNNRWREELSHMKRLPPVLPGRPYDLAAATVATDLESGGAGAACGGSNLAPLPRRETEEFNDLLDLDFILSNSLTHPPESVAATVSSSASASSSSSPSSSGPASAPSTCSFTYPIRAGNDPGVAPGGTGGGLLYGRESAPPPTAPFNLADINDVSPSGGFVAELLRPELDPVYIPPQQPQPPGGGLMGKFVLKASLSAPGSEYGSPSVISVSKGSPDGSHPVVVAPYNGGPPRTCPKIKQEAVSSCTHLGAGPPLSNGHRPAAHDFPLGRQLPSRTTPTLGLEEVLSSRDCHPALPLPPGFHPHPGPNYPSFLPDQMQPQVPPLHYQELMPPGSCMPEEPKPKRGRRSWPRKRTATHTCDYAGCGKTYTKSSHLKAHLRTHTGEKPYHCDWDGCGWKFARSDELTRHYRKHTGHRPFQCQKCDRAFSRSDHLALHMKRHF

SEQ ID NO: 11 - protein, 454 aa, Homo sapiens
MDFFRVVENQQPPATMPLNVSFTNRNYDLDYDSVQPYFYCDEEENFYQQQQQSELQPPAPSEDIWKKFELLPTPPLSPSRRSGLCSPSYVAVTPFSLRGDNDGGGGSFSTADQLEMVTELLGGDMVNQSFICDPDDETFIKNIIIQDCMWSGFSAAAKLVSEKLASYQAARKDSGSPNPARGHSVCSTSSLYLQDLSAAASECIDPSVVFPYPLNDSSSPKSCASQDSSAFSPSSDSLLSSTESSPQGSPEPLVLHEETPPTTSSDSEEEQEDEEEIDVVSVEKRQAPGKRSESGSPSAGGHSKPPHSPLVLKRCHVSTHQHNYAAPPSTRKDYPAAKRVKLDSVRVLRQISNNRKCTSPRSSDTEENVKRRTHNVLERQRRNELKRSFFALRDQIPELENNEKAPKVVILKKATAYILSVQAEEQKLISEEDLLRKRREQLKHKLEQLRNSCA

SEQ ID NO: 12 - DNA, 191 bp, Homo sapiens
ttgaatcgcgggacccgttggcagaggtggcggcggcggcatgggtgccccgacgttgccccctgcctggcagccctttctcaaggaccaccgcatctctacattcaagaactggcccttcttggagggctgcgcctgcaccccggagcgggtgagactgcccggcctcctggggtcccccacgcccgcct

SEQ ID NO: 13 - DNA, 190 bp, Homo sapiens
ggctgccacgtccactcacgagctgtgctgtcccttgcagatggccgaggctggcttcatccactgccccactgagaacgagccagacttggcccagtgtttcttctgcttcaaggagctggaaggctgggagccagatgacgaccccatgtaagtcttctctggccagcctcgatgggctttgttttga

SEQ ID NO: 14 - DNA, 198 bp, Homo sapiens
cccttcagctgcctttccgctgttgttttgatttttctagagaggaacataaaaagcattcgtccggttgcgctttcctttctgtcaagaagcagtttgaagaattaacccttggtgaatttttgaaactggacagagaaagagccaagaacaaaattgtatgtattgggaataagaactgctcaaaccctgttcaat

SEQ ID NO: 15 - DNA, 170 bp, Homo sapiens
gctctggtttcagtgtcatgtgtctattctttatttccaggcaaaggaaaccaacaataagaagaaagaatttgaggaaactgcggagaaagtgcgccgtgccatcgagcagctggctgccatggattgaggcctctggccggagctgcctggtcccagagtggctgcac

SEQ ID NO: 16 - DNA, 20 bp, Homo sapiens
ttgccccctgcctggcagcc

SEQ ID NO: 17 - DNA, 20 bp, Homo sapiens
ttcttgaatgtagagatgcg

SEQ ID NO: 18 - DNA, 20 bp, Homo sapiens
tgggtgccccgacgttgccc

SEQ ID NO: 19 - DNA, 20 bp, Homo sapiens
tgcggtggtccttgagaaag

SEQ ID NO: 20 - DNA, 20 bp, Homo sapiens
tcaaggaccaccgcatctct

SEQ ID NO: 21 - DNA, 20 bp, Homo sapiens
tgcaggcgcagccctccaag

SEQ ID NO: 22 - DNA, 20 bp, Homo sapiens
tggccgaggctggcttcatc

SEQ ID NO: 23 - DNA, 20 bp, Homo sapiens
tgggccaagtctggctcgtt

SEQ ID NO: 24 - DNA, 20 bp, Homo sapiens
ttggcccagtgtttcttctg

SEQ ID NO: 25 - DNA, 20 bp, Homo sapiens
tcgtcatctggctcccagcc

SEQ ID NO: 26 - DNA, 20 bp, Homo sapiens
tgcgctttcctttctgtcaa

SEQ ID NO: 27 - DNA, 20 bp, Homo sapiens
tcaaaaattcaccaagggtt

SEQ ID NO: 28 - protein, 297 aa, Homo sapiens
MEDYTKIEKIGEGTYGVVYKGRHKTTGQVVAMKKIRLESEEEGVPSTAIREISLLKELRHPNIVSLQDVLMQDSRLYLIFEFLSMDLKKYLDSIPPGQYMDSSLVKSYLYQILQGIVFCHSRRVLHRDLKPQNLLIDDKGTIKLADFGLARAFGIPIRVYTHEVVTLWYRSPEVLLGSARYSTPVDIWSIGTIFAELATKKPLFHGDSEIDQLFRIFRALGTPNNEVWPEVESLQDYKNTFPKWKPGSLASHVKNLDENGLDLLSKMLIYDPAKRISGKMALNHPYFNDLDNQIKKM

SEQ ID NO: 29 - protein, 298 aa, Homo sapiens
MENFQKVEKIGEGTYGVVYKARNKLTGEVVALKKIRLDTETEGVPSTAIREISLLKELNHPNIVKLLDVIHTENKLYLVFEFLHQDLKKFMDASALTGIPLPLIKSYLFQLLQGLAFCHSHRVLHRDLKPQNLLINTEGAIKLADFGLARAFGVPVRTYTHEVVTLWYRAPEILLGCKYYSTAVDIWSLGCIFAEMVTRRALFPGDSEIDQLFRIFRTLGTPDEVVWPGVTSMPDYKPSFPKWARQDFSKVVPPLDEDGRSLLSQMLHYDPNKRISAKAALAHPFFQDVTKPVPHLRL

SEQ ID NO: 30 - protein, 305 aa, Homo sapiens
MDMFQKVEKIGEGTYGVVYKAKNRETGQLVALKKIRLDLEMEGVPSTAIREISLLKELKHPNIVRLLDVVHNERKLYLVFEFLSQDLKKYMDSTPGSELPLHLIKSYLFQLLQGVSFCHSHRVIHRDLKPQNLLINELGAIKLADFGLARAFGVPLRTYTHEVVTLWYRAPEILLGSKFYTTAVDIWSIGCIFAEMVTRKALFPGDSEIDQLFRIFRMLGTPSEDTWPGVTQLPDYKGSFPKWTRKGLEEIVPNLEPEGRDLLMQLLQYDPSQRITAKTALAHPYFSSPEPSPAARQYVLQRFRH

SEQ ID NO: 31 - protein, 303 aa, Homo sapiens
MATSRYEPVAEIGVGAYGTVYKARDPHSGHFVALKSVRVPNGGGGGGGLPISTVREVALLRRLEAFEHPNVVRLMDVCATSRTDREIKVTLVFEHVDQDLRTYLDKAPPPGLPAETIKDLMRQFLRGLDFLHANCIVHRDLKPENILVTSGGTVKLADFGLARIYSYQMALTPVVVTLWYRAPEVLLQSTYATPVDMWSVGCIFAEMFRRKPLFCGNSEADQLGKIFDLIGLPPEDDWPRDVSLPRGAFPPRGPRPVQSVVPEMEESGAQLLLEMLTFNPHKRISAFRALQHSYLHKDEGNPE

SEQ ID NO: 32 - protein, 292 aa, Homo sapiens
MQKYEKLEKIGEGTYGTVFKAKNRETHEIVALKRVRLDDDDEGVPSSALREICLLKELKHKNIVRLHDVLHSDKKLTLVFEFCDQDLKKYFDSCNGDLDPEIVKSFLFQLLKGLGFCHSRNVLHRDLKPQNLLINRNGELKLADFGLARAFGIPVRCYSAEVVTLWYRPPDVLFGAKLYSTSIDMWSAGCIFAELANAGRPLFPGNDVDDQLKRIFRLLGTPTEEQWPSMTKLPDYKPYPMYPATTSLVNVVPKLNATGRDLLQNLLKCNPVQRISAEEALQHPYFSDFCPP

SEQ ID NO: 33 - protein, 326 aa, Homo sapiens
MEKDGLCRADQQYECVAEIGEGAYGKVFKARDLKNGGRFVALKRVRVQTGEEGMPLSTIREVAVLRHLETFEHPNVVRLFDVCTVSRTDRETKLTLVFEHVDQDLTTYLDKVPEPGVPTETIKDMMFQLLRGLDFLHSHRVVHRDLKPQNILVTSSGQIKLADFGLARIYSFQMALTSVVVTLWYRAPEVLLQSSYATPVDLWSVGCIFAEMFRRKPLFRGSSDVDQLGKILDVIGLPGEEDWPRDVALPRQAFHSKSAQPIEKFVTDIDELGKDLLLKCLTFNPAKRISAYSALSHPYFQDLERCKENLDSHLPPSQNTSELNTA

SEQ ID NO: 34 - protein, 142 aa, Homo sapiens
MGAPTLPPAWQPFLKDHRISTFKNWPFLEGCACTPERMAEAGFIHCPTENEPDLAQCFFCFKELEGWEPDDDPIEEHKKHSSGCAFLSVKKQFEELTLGEFLKLDRERAKNKIAKETNNKKKEFEETAEKVRRAIEQLAAMD

SEQ ID NO: 35 - protein, 826 aa, Homo sapiens
MEGAGGANDKKKISSERRKEKSRDAARSRRSKESEVFYELAHQLPLPHNVSSHLDKASVMRLTISYLRVRKLLDAGDLDIEDDMKAQMNCFYLKALDGFVMVLTDDGDMIYISDNVNKYMGLTQFELTGHSVFDFTHPCDHEEMREMLTHRNGLVKKGKEQNTQRSFFLRMKCTLTSRGRTMNIKSATWKVLHCTGHIHVYDTNSNQPQCGYKKPPMTCLVLICEPIPHPSNIEIPLDSKTFLSRHSLDMKFSYCDERITELMGYEPEELLGRSIYEYYHALDSDHLTKTHHDMFTKGQVTTGQYRMLAKRGGYVWVETQATVIYNTKNSQPQCIVCVNYVVSGIIQHDLIFSLQQTECVLKPVESSDMKMTQLFTKVESEDTSSLFDKLKKEPDALTLLAPAAGDTIISLDFGSNDTETDDQQLEEVPLYNDVMLPSPNEKLQNINLAMSPLPTAETPKPLRSSADPALNQEVALKLEPNPESLELSFTMPQIQDQTPSPSDGSTRQSSPEPNSPSEYCFYVDSDMVNEFKLELVEKLFAEDTEAKNPFSTQDTDLDLEMLAPYIPMDDDFQLRSFDQLSPLESSSASPESASPQSTVTVFQQTQIQEPTANATTTTATTDELKTVTKDRMEDIKILIASPSPTHIHKETTSATSSPYRDTQSRTASPNRAGKGVIEQTEKSHPRSPNVLSVALSQRTTVPEEELNPKILALQNAQRKRKMEHDGSLFQAVGIGTLLQQPDDHAATTSLSWKRVKGCKSSEQNGMEQKTIILIPSDLACRLLGQSMDESGLPQLTSYDCEVNAPIQGSRNLLQGEELLRALDQVN

SEQ ID NO: 36 - protein, 449 aa, Homo sapiens
MGRVGGMAQPMGRAGAPKPMGRAGSARRGRFKGCWSEGSPVHPVPAVLSWLLALLRCASTMLSLRVPLAPITDPQQLQLSPLKGLSLVDKENTPPALSGTRVLASKTARRIFQEPTEPKTKAAAPGVEDEPLLRENPRRFVIFPIEYHDIWQMYKKAEASFWTAEEVDLSKDIQHWESLKPEERYFISHVLAFFAASDGIVNENLVERFSQEVQITEARCFYGFQIAMENIHSEMYSLLIDTYIKDPKEREFLFNAIETMPCVKKKADWALRWIGDKEATYGERVVAFAAVEGIFFSGSFASIFWLKKRGLMPGLTFSNELISRDEGLHCDFACLMFKHLVHKPSEERVREIIINAVRIEQEFLTEALPVKLIGMNCTLMKQYIEFVADRLMLELGFSKVFRVENPFDFMENISLEGKTNFFEKRVGEYQRMGVMSSPTENSFTLDADF

SEQ ID NO: 37 - protein, 188 aa, Homo sapiens [sequence omitted]

SEQ ID NO: 38 - protein, 1210 aa, Homo sapiens [sequence omitted]

SEQ ID NO: 39 - protein, 454 aa, Homo sapiens; identical to SEQ ID NO: 11

SEQ ID NO: 40 - protein, 889 aa, Homo sapiens
MEEGAPRQPGPSQWPPEDEKEVIRRAIQKELKIKEGVENLRRVATDRRHLGHVQQLLRSSNRRLEQLHGELRELHARILLPGPGPGPAEPVASGPRPWAEQLRARHLEALRRQLHVELKVKQGAENMTHTCASGTPKERKLLAAAQQMLRDSQLKVALLRMKISSLEASGSPEPGPELLAEELQHRLHVEAAVAEGAKNVVKLLSSRRTQDRKALAEAQAQLQESSQKLDLLRLALEQLLEQLPPAHPLRSRVTRELRAAVPGYPQPSGTPVKPTALTGTLQVRLLGCEQLLTAVPGRSPAAALASSPSEGWLRTKAKHQRGRGELASEVLAVLKVDNRVVGQTGWGQVAEQSWDQTFVIPLERARELEIGVHWRDWRQLCGVAFLRLEDFLDNACHQLSLSLVPQGLLFAQVTFCDPVIERRPRLQRQERIFSKRRGQDFLRASQMNLGMAAWGRLVMNLLPPCSSPSTISPPKGCPRTPTTLREASDPATPSNFLPKKTPLGEEMTPPPKPPRLYLPQEPTSEETPRTKRPHMEPRTRRGPSPPASPTRKPPRLQDFRCLAVLGRGHFGKVLLVQFKGTGKYYAIKALKKQEVLSRDEIESLYCEKRILEAVGCTGHPFLLSLLACFQTSSHACFVTEFVPGGDLMMQIHEDVFPEPQARFYVACVVLGLQFLHEKKIIYRDLKLDNLLLDAQGFLKIADFGLCKEGIGFGDRTSTFCGTPEFLAPEVLTQEAYTRAVDWWGLGVLLYEMLVGECPFPGDTEEEVFDCIVNMDAPYPGFLSVQGLEFIQKLLQKCPEKRLGAGEQDAEEIKVQPFFRTTNWQALLARTIQPPFVPTLCGPADLRYFEGEFTGLPPALTPPAPHSLLTARQQAAFRDFDFVSERFLEP

SEQ ID NO: 41 - protein, 1056 aa, Homo sapiens
MASQPNSSAKKKEEKGKNIQVVVRCRPFNLAERKASAHSIVECDPVRKEVSVRTGGLADKSSRKTYTFDMVFGASTKQIDVYRSVVCPILDEVIMGYNCTIFAYGQTGTGKTFTMEGERSPNEEYTWEEDPLAGIIPRTLHQIFEKLTDNGTEFSVKVSLLEIYNEELFDLLNPSSDVSERLQMFDDPRNKRGVIIKGLEEITVHNKDEVYQILEKGAAKRTTAATLMNAYSSRSHSVFSVTIHMKETTIDGEELVKIGKLNLVDLAGSENIGRSGAVDKRAREAGNINQSLLTLGRVITALVERTPHVPYRESKLTRILQDSLGGRTRTSIIATISPASLNLEETLSTLEYAHRAKNILNKPEVNQKLTKKALIKEYTEEIERLKRDLAAAREKNGVYISEENFRVMSGKLTVQEEQIVELIEKIGAVEEELNRVTELFMDNKNELDQCKSDLQNKTQELETTQKHLQETKLQLVKEEYITSALESTEEKLHDAASKLLNTVEETTKDVSGLHSKLDRKKAVDQHNAEAQDIFGKNLNSLFNNMEELIKDGSSKQKAMLEVHKTLFGNLLSSSVSALDTITTVALGSLTSIPENVSTHVSQIFNMILKEQSLAAESKTVLQELINVLKTDLLSSLEMILSPTVVSILKINSQLKHIFKTSLTVADKIEDQKKELDGFLSILCNNLHELQENTICSLVESQKQCGNLTEDLKTIKQTHSQELCKLMNLWTERFCALEEKCENIQKPLSSVQENIQQKSKDIVNKMTFHSQKFCADSDGFSQELRNFNQEGTKLVEESVKHSDKLNGNLEKISQETEQRCESLNTRTVYFSEQWVSSLNEREQELHNLLEVVSQCCEASSSDITEKSDGRKAAHEKQHNIFLDQMTIDEDKLIAQNLELNETIKIGLTKLNCFLEQDLKLDIPTGTTPQRKSYLYPSTLVRTEPREHLLDQLKRKQPELLMMLNCSENNKEETIPDVDVEEAVLGQYTEEPLSQEPSVDAGVDCSSIGGVPFFQHKKSHGKDKENRGINTLERSKVEETTEHLVTKSRLPLRAQINL

SEQ ID NO: 42 - protein, 2825 aa, Homo sapiens
MYASLGSGPVAPLPASVPPSVLGSWSTGGSRSCVRQETKSPGGARTSGHWASVWQEVLKQLQGSIEDEAMASSGQIDLLERLKELNLDSSNFPGVKLRSKMSLRSYGSREGSVSSRSGECSPVPMGSFPRRGFVNGSRESTGYLEELEKERSLLLADLDKEEKEKDWYYAQLQNLTKRIDSLPLTENFSLQTDMTRRQLEYEARQIRVAMEEQLGTCQDMEKRAQRSSQNKHETGSHDAERQNEGQGVGEINMATSGNGQGSTTRMDHETASVLSSSSTHSAPRRLTSHLGTKVEMVYSLLSMLGTHDKDDMSRTLLAMSSSQDSCISMRQSGCLPLLIQLLHGNDKDSVLLGNSRGSKEARARASAALHNIIHSQPDDKRGRREIRVLHLLEQIRAYCETCWEWQEAHEPGMDQDKNPMPAPVEHQICPAVCVLMKLSFDEEHRHAMNELGGLQAIAELLQVDCEMYGLTNDHYSITLRRYAGMALTNLTFGDVANKATLCSMKGCMRALVAQLKSESEDLQQVIASVLRNLSWRADVNSKKTLREVGSVKALMECALEVKKESTLKSVLSALWNLSAHCTENKADICAVDGALAFLVGTLTYRSQTNTLAIIESGGGILRNVSSLIATNEDHRQILRENNCLQTLLQHLKSHSLTIVSNACGTLWNLSARNPKDQEALWDMGAVSMLKNLIHSKHKMIAMGSAAALRNLMANRPAKYKDANIMSPGSSLPSLHVRKQKALEAELDAQHLSETFDNIDNLSPKASHRSKQRHKQSLYGDYVFDTNRHDDNRSDNFNTGNMTVLSPYLNTTVLPSSSSSRGSLDSSRSEKDRSLERERGIGLGNYHPATENPGTSSKRGLQISTTAAQIAKVMEEVSAIHTSQEDRSSGSTTELHCVTDERNALRRSSAAHTHSNTYNFTKSENSNRTCSMPYAKLEYKRSSNDSLNSVSSSDGYGKRGQMKPSIESYSEDDESKFCSYGQYPADLAHKIHSANHMDDNDGELDTPINYSLKYSDEQLNSGRQSPSQNERWARPKHIIEDEIKQSEQRQSRNQSTTYPVYTESTDDKHLKFQPHFGQQECVSPYRSRGANGSETNRVGSNHGINQNVSQSLCQEDDYEDDKPTNYSERYSEEEQHEEEERPTNYSIKYNEEKRHVDQPIDYSLKYATDIPSSQKQSFSFSKSSSGQSSKTEHMSSSSENTSTPSSNAKRQNQLHPSSAQSRSGQPQKAATCKVSSINQETIQTYCVEDTPICFSRCSSLSSLSSAEDEIGCNQTTQEADSANTLQIAEIKEKIGTRSAEDPVSEVPAVSQHPRTKSSRLQGSSLSSESARHKAVEFSSGAKSPSKSGAQTPKSPPEHYVQETPLMFSRCTSVSSLDSFESRSIASSVQSEPCSGMVSGIISPSDLPDSPGQTMPPSRSKTPPPPPQTAQTKREVPKNKAPTAEKRESGPKQAAVNAAVQRVQVLPDADTLLHFATESTPDGFSCSSSLSALSLDEPFIQKDVELRIMPPVQENDNGNETESEQPKESNENQEKEAEKTIDSEKDLLDDSDDDDIEILEECIISAMPTKSSRKAKKPAQTASKLPPPVARKPSQLPVYKLLPSQNRLQPQKHVSFTPGDDMPRVYCVEGTPINFSTATSLSDLTIESPPNELAAGEGVRGGAQSGEFEKRDTIPTEGRSTDEAQGGKTSSVTIPELDDNKAEEGDILAECINSAMPKGKSHKPFRVKKIMDQVQQASASSSAPNKNQLDGKKKKPTSPVKPIPQNTEYRTRVRKNADSKNNLNAERVFSDNKDSKKQNLKNNSKVFNDKLPNNEDRVRGSFAFDSPHHYTPIEGTPYCFSRNDSLSSLDFDDDDVDLSREKAELRKAKENKESEAKVTSHTELTSNQQSANKTQAIAKQPINRGQPKPILQKQSTFPQSSKDIPDRGAATDEKLQNFAIENTPVCFSHNSSLSSLSDIDQENNNKENEPIKETEPPDSQGEPSKPQASGYAPKSFHVEDTPVCFSRNSSLSSLSIDSEDDLLQECISSAMPKKKKPSRLKGDNEKHSPRNMGGILGEDLTLDLKDIQRPDSEHGLSPDSENFDWKAIQEGANSIVSSLHQAAAAACLSRQASSDSDSILSLKSGISLGSPFHLTPDQEEKPFTSNKGPRILKPGEKSTLETKKIESESKGIKGGKKVYKSLITGKVRSNSEISGQMKQPLQANMPSISRGRTMIHIPGVRNSSSSTSPVSKKGPPLKTPASKSPSEGQTATTSPRGAKPSVKSELSPVARQTSQIGGSSKAPSRSGSRDSTPSRPAQQPLSRPIQSPGRNSISPGRNGISPPNKLSQLPRTSSPSTASTKSSGSGKMSYTSPGRQMSQQNLTKQTGLSKNASSIPRSESASKGLNQMNNGNGANKKVELSRMSSTKSSGSESDRSERPVLVRQSTFIKEAPSPTLRRKLEESASFESLSPSSRPASPTRSQAQTPVLSPSLPDMSLSTHSSVQAGGWRKLPPNLSPTIEYNDGRPAKRHDIARSHSESPSRLPINRSGTWKREHSKHSSSLPRVSTWRRTGSSSSILSASSESSEKAKSEDEKHVNSISGTKQSKENQVSAKGTWRKIKENEFSPTNSTSQTVSSGATNGAESKTLIYQMAPAVSKTEDVWVRIEDCPINNPRSGRSPTGNTPPVIDSVSEKANPNIKDSKDNQAKQNVGNGSVPMRTVGLENRLNSFIQVDAPDQKGTEIKPGQNNPVPVSETNESSIVERTPFSSSSSSKHSSPSGTVAARVTPFNYNPSPRKSSADSTSARPSQIPTPVNNNTKKRDSKTDSTESSGTQSPKRHSGSYLVTSV

SEQ ID NO: 43 - protein, 1863 aa, Homo sapiens
MDLSALRVEEVQNVINAMQKILECPICLELIKEPVSTKCDHIFCKFCMLKLLNQKKGPSQCPLCKNDITKRSLQESTRFSQLVEELLKIICAFQLDTGLEYANSYNFAKKENNSPEHLKDEVSIIQSMGYRNRAKRLLQSEPENPSLQETSLSVQLSNLGTVRTLRTKQRIQPQKTSVYIELGSDSSEDTVNKATYCSVGDQELLQITPQGTRDEISLDSAKKAACEFSETDVTNTEHHQPSNNDLNTTEKRAAERHPEKYQGSSVSNLHVEPCGTNTHASSLQHENSSLLLTKDRMNVEKAEFCNKSKQPGLARSQHNRWAGSKETCNDRRTPSTEKKVDLNADPLCERKEWNKQKLPCSENPRDTEDVPWITLNSSIQKVNEWFSRSDELLGSDDSHDGESESNAKVADVLDVLNEVDEYSGSSEKIDLLASDPHEALICKSERVHSKSVESNIEDKIFGKTYRKKASLPNLSHVTENLIIGAFVTEPQIIQERPLTNKLKRKRRPTSGLHPEDFIKKADLAVQKTPEMINQGTNQTEQNGQVMNITNSGHENKTKGDSIQNEKNPNPIESLEKESAFKTKAEPISSSISNMELELNIHNSKAPKKNRLRRKSSTRHIHALELVVSRNLSPPNCTELQIDSCSSSEEIKKKKYNQMPVRHSRNLQLMEGKEPATGAKKSNKPNEQTSKRHDSDTFPELKLTNAPGSFTKCSNTSELKEFVNPSLPREEKEEKLETVKVSNNAEDPKDLMLSGERVLQTERSVESSSISLVPGTDYGTQESISLLEVSTLGKAKTEPNKCVSQCAAFENPKGLIHGCSKDNRNDTEGFKYPLGHEVNHSRETSIEMEESELDAQYLQNTFKVSKRQSFAPFSNPGNAEEECATFSAHSGSLKKQSPKVTFECEQKEENQGKNESNIKPVQTVNITAGFPVVGQKDKPVDNAKCSIKGGSRFCLSSQFRGNETGLITPNKHGLLQNPYRIPPLFPIKSFVKTKCKKNLLEENFEEHSMSPEREMGNENIPSTVSTISRNNIRENVFKEASSSNINEVGSSTNEVGSSINEIGSSDENIQAELGRNRGPKLNAMLRLGVLQPEVYKQSLPGSNCKHPEIKKQEYEEVVQTVNTDFSPYLISDNLEQPMGSSHASQVCSETPDDLLDDGEIKEDTSFAENDIKESSAVFSKSVQKGELSRSPSPFTHTHLAQGYRRGAKKLESSEENLSSEDEELPCFQHLLFGKVNNIPSQSTRHSTVATECLSKNTEENLLSLKNSLNDCSNQVILAKASQEHHLSEETKCSASLFSSQCSELEDLTANTNTQDPFLIGSSKQMRHQSESQGVGLSDKELVSDDEERGTGLEENNQEEQSMDSNLGEAASGCESETSVSEDCSGLSSQSDILTTQQRDTMQHNLIKLQQEMAELEAVLEQHGSQPSNSYPSIISDSSALEDLRNPEQSTSEKAVLTSQKSSEYPISQNPEGLSADKFEVSADSSTSKNKEPGVERSSPSKCPSLDDRWYMHSCSGSLQNRNYPSQEELIKVVDVEEQQLEESGPHDLTETSYLPRQDLEGTPYLESGISLFSDDPESDPSEDRAPESARVGNIPSSTSALKVPQLKVAESAQSPAAAHTTDTAGYNAMEESVSREKPELTASTERVNKRMSMVVSGLTPEEFMLVYKFARKHHITLTNLITEETTHVVMKTDAEFVCERTLKYFLGIAGGKWVVSYFWVTQSIKERKMLNEHDFEVRGDVVNGRNHQGPKRARESQDRKIFRGLEICCYGPFTNMPTDQLEWMVQLCGASVVKELSSFTLGTGVHPIVVVQPDAWTEDNGFHAIGQMCEAPVVTREWVLDSVALYQCQELDTYLIPQIPHSHY

SEQ ID NO: 44 - protein, 3418 aa, Homo sapiens
MPIGSKERPTFFEIFKTRCNKADLGPISLNWFEELSSEAPPYNSEPAEESEHKNNNYEPNLFKTPQRKPSYNQLASTPIIFKEQGLTLPLYQSPVKELDKFKLDLGRNVPNSRHKSLRTVKTKMDQADDVSCPLLNSCLSESPVVLQCTHVTPQRDKSVVCGSLFHTPKFVKGRQTPKHISESLGAEVDPDMSWSSSLATPPTLSSTVLIVRNEEASETVFPHDTTANVKSYFSNHDESLKKNDRFIASVTDSENTNQREAASHGFGKTSGNSFKVNSCKDHIGKSMPNVLEDEVYETVVDTSEEDSFSLCFSKCRTKNLQKVRTSKTRKKIFHEANADECEKSKNQVKEKYSFVSEVEPNDTDPLDSNVANQKPFESGSDKISKEVVPSLACEWSQLTLSGLNGAQMEKIPLLHISSCDQNISEKDLLDTENKRKKDFLTSENSLPRISSLPKSEKPLNEETVVNKRDEEQHLESHTDCILAVKQAISGTSPVASSFQGIKKSIFRIRESPKETFNASFSGHMTDPNFKKETEASESGLEIHTVCSQKEDSLCPNLIDNGSWPATTTQNSVALKNAGLISTLKKKTNKFIYAIHDETSYKGKKIPKDQKSELINCSAQFEANAFEAPLTFANADSGLLHSSVKRSCSQNDSEEPTLSLTSSFGTILRKCSRNETCSNNTVISQDLDYKEAKCNKEKLQLFITPEADSLSCLQEGQCENDPKSKKVSDIKEEVLAAACHPVQHSKVEYSDTDFQSQKSLLYDHENASTLILTPTSKDVLSNLVMISRGKESYKMSDKLKGNNYESDVELTKNIPMEKNQDVCALNENYKNVELLPPEKYMRVASPSRKVQFNQNTNLRVIQKNQEETTSISKITVNPDSEELFSDNENNFVFQVANERNNLALGNTKELHETDLTCVNEPIFKNSTMVLYGDTGDKQATQVSIKKDLVYVLAEENKNSVKQHIKMTLGQDLKSDISLNIDKIPEKNNDYMNKWAGLLGPISNHSFGGSFRTASNKEIKLSEHNIKKSKMFFKDIEEQYPTSLACVEIVNTLALDNQKKLSKPQSINTVSAHLQSSVVVSDCKNSHITPQMLFSKQDFNSNHNLTPSQKAEITELSTILEESGSQFEFTQFRKPSYILQKSTFEVPENQMTILKTTSEECRDADLHVIMNAPSIGQVDSSKQFEGTVEIKRKFAGLLKNDCNKSASGYLTDENEVGFRGFYSAHGTKLNVSTEALQKAVKLFSDIENISEETSAEVHPISLSSSKCHDSVVSMFKIENHNDKTVSEKNNKCQLILQNNIEMTTGTFVEEITENYKRNTENEDNKYTAASRNSHNLEFDGSDSSKNDTVCIHKDETDLLFTDQHNICLKLSGQFMKEGNTQIKEDLSDLTFLEVAKAQEACHGNTSNKEQLTATKTEQNIKDFETSDTFFQTASGKNISVAKESFNKIVNFFDQKPEELHNFSLNSELHSDIRKNKMDILSYEETDIVKHKILKESVPVGTGNQLVTFQGQPERDEKIKEPTLLGFHTASGKKVKIAKESLDKVKNLFDEKEQGTSEITSFSHQWAKTLKYREACKDLELACETIEITAAPKCKEMQNSLNNDKNLVSIETVVPPKLLSDNLCRQTENLKTSKSIFLKVKVHENVEKETAKSPATCYTNQSPYSVIENSALAFYTSCSRKTSVSQTSLLEAKKWLREGIFDGQPERINTADYVGNYLYENNSNSTIAENDKNHLSEKQDTYLSNSSMSNSYSYHSDEVYNDSGYLSKNKLDSGIEPVLKNVEDQKNTSFSKVISNVKDANAYPQTVNEDICVEELVTSSSPCKNKNAAIKLSISNSNNFEVGPPAFRIASGKIVCVSHETIKKVKDIFTDSFSKVIKENNENKSKICQTKIMAGCYEALDDSEDILHNSLDNDECSTHSHKVFADIQSEEILQHNQNMSGLEKVSKISPCDVSLETSDICKCSIGKLHKSVSSANTCGIFSTASGKSVQVSDASLQNARQVFSEIEDSTKQVFSKVLFKSNEHSDQLTREENTAIRTPEHLISQKGFSYNVVNSSAFSGFSTASGKQVSILESSLHKVKGVLEEFDLIRTEHSLHYSPTSRQNVSKILPRVDKRNPEHCVNSEMEKTCSKEFKLSNNLNVEGGSSENNHSIKVSPYLSQFQQDKQQLVLGTKVSLVENIHVLGKEQASPKNVKMEIGKTETFSDVPVKTNIEVCSTYSKDSENYFETEAVEIAKAFMEDDELTDSKLPSHATHSLFTCPENEEMVLSNSRIGKRRGEPLILVGEPSIKRNLLNEFDRIIENQEKSLKASKSTPDGTIKDRRLFMHHVSLEPITCVPFRTTKERQEIQNPNFTAPGQEFLSKSHLYEHLTLEKSSSNLAVSGHPFYQVSATRNEKMRHLITTGRPTKVFVPPFKTKSHFHRVEQCVRNINLEENRQKQNIDGHGSDDSKNKINDNEIHQFNKNNSNQAAAVTFTKCEEEPLDLITSLQNARDIQDMRIKKKQRQRVFPQPGSLYLAKTSTLPRISLKAAVGGQVPSACSHKQLYTYGVSKHCIKINSKNAESFQFHTEDYFGKESLWTGKGIQLADGGWLIPSNDGKAGKEEFYRALCDTPGVDPKLISRIWVYNHYRWIIWKLAAMECAFPKEFANRCLSPERVLLQLKYRYDTEIDRSRRSAIKKIMERDDTAAKTLVLCVSDIISLSANISETSSNKTSSADTQKVAIIELTDGWYAVKAQLDPPLLAVLKNGRLTVGQKIILHGAELVGSPDACTPLEAPESLMLKISANSTRPARWYTKLGFFPDPRPFPLPLSSLFSDGGNVGCVDVIIQRAYPIQWMEKTSSGLYIFRNEREEEKEAAKYVEAQQKRLEALFTKIQEEFEEHEENTTKPYLPSRALTRQQVRALQDGAELYEAVKNAADPAYLEGYFSEEQLRALNNHRQMLNDKKQAQIQLEIRKAMESAEQKEQGLSRDVTTVWKLRIVSYSKKEKDSVILSIWRPSSDLYSLLTEGKRYRIYHLATSKSKSKSERANIQLAATKKTQYQQLPVSDEILFQIYQPREPLHFSKFLDPDFQPSCSEVDLIGFVVSVVKKTGLAPFVYLSDECYNLLAIKFWIDLNEDIIKPHMLIAASNLQWRPESKSGLLTLFAGDFSVFSASPKEGHFQETFNKMKNTVENIDILCNEAENKLMHILHANDPKWSTPTKDCTSGPYTAQIIPGTGNKLLMSSPNCEIYYQSPLSLCMAKRKSVSTPVSAQMTSKSCKGEKEIDDQKNCKKRRALDFLSRLPLPPPVSPICTFVSPAAQKAFQPPRSCGTKYETPIKKKELNSPQMTPFKKFNEISLLESNSIADEELALINTQALLSGSTGEKQFISVSESTRTAPTSSEDYLRLKRRCTTSLIKEQESSQASTEECEKNKQDTITTKKYI

SEQ ID NO: 45 - protein, 393 aa, Homo sapiens [sequence omitted]

SEQ ID NO: 46 - protein, 770 aa, Homo sapiens
MLPGLALLLLAAWTARALEVPTDGNAGLLAEPQIAMFCGRLNMHMNVQNGKWDSDPSGTKTCIDTKEGILQYCQEVYPELQITNVVEANQPVTIQNWCKRGRKQCKTHPHFVIPYRCLVGEFVSDALLVPDKCKFLHQERMDVCETHLHWHTVAKETCSEKSTNLHDYGMLLPCGIDKFRGVEFVCCPLAEESDNVDSADAEEDDSDVWWGGADTDYADGSEDKVVEVAEEEEVAEVEEEEADDDEDDEDGDEVEEEAEEPYEEATERTTSIATTTTTTTESVEEVVREVCSEQAETGPCRAMISRWYFDVTEGKCAPFFYGGCGGNRNNFDTEEYCMAVCGSAMSQSLLKTTQEPLARDPVKLPTTAASTPDAVDKYLETPGDENEHAHFQKAKERLEAKHRERMSQVMREWEEAERQAKNLPKADKKAVIQHFQEKVESLEQEAANERQQLVETHMARVEAMLNDRRRLALENYITALQAVPPRPRHVFNMLKKYVRAEQKDRQHTLKHFEHVRMVDPKKAAQIRSQVMTHLRVIYERMNQSLSLLYNVPAVAEEIQDEVDELLQKEQNYSDDVLANMISEPRISYGNDALMPSLTETKTTVELLPVNGEFSLDDLQPWHSFGADSVPANTENEVEPVDARPAADRGLTTRPGSGLTNIKTEEISEVKMDAEFRHDSGYEVHHQKLVFFAEDVGSNKGAIIGLMVGGVVIATVIVITLVMLKKKQYTSIHHGVVEVDAAVTPEERHLSKMQQNGYENPTYKFFEQMQN

SEQ ID NO: 47 - protein, 3144 aa, Homo sapiens
MATLEKLMKAFESLKSFQQQQQQQQQQQQQQQQQQQQQQQPPPPPPPPPPPQLPQPPPQAQPLLPQPQPPPPPPPPPPGPAVAEEPLHRPKKELSATKKDRVNHCLTICENIVAQSVRNSPEFQKLLGIAMELFLLCSDDAESDVRMVADECLNKVIKALMDSNLPRLQLELYKEIKKNGAPRSLRAALWRFAELAHLVRPQKCRPYLVNLLPCLTRTSKRPEESVQETLAAAVPKIMASFGNFANDNEIKVLLKAFIANLKSSSPTIRRTAAGSAVSICQHSRRTQYFYSWLLNVLLGLLVPVEDEHSTLLILGVLLTLRYLVPLLQQQVKDTSLKGSFGVTRKEMEVSPSAEQLVQVYELTLHHTQHQDHNVVTGALELLQQLFRTPPPELLQTLTAVGGIGQLTAAKEESGGRSRSGSIVELIAGGGSSCSPVLSRKQKGKVLLGEEEALEDDSESRSDVSSSALTASVKDEISGELAASSGVSTPGSAGHDIITEQPRSQHTLQADSVDLASCDLTSSATDGDEEDILSHSSSQVSAVPSDPAMDLNDGTQASSPISDSSQTTTEGPDSAVTPSDSSEIVLDGTDNQYLGLQIGQPQDEDEEATGILPDEASEAFRNSSMALQQAHLLKNMSHCRQPSDSSVDKFVLRDEATEPGDQENKPCRIKGDIGQSTDDDSAPLVHCVRLLSASFLLTGGKNVLVPDRDVRVSVKALALSCVGAAVALHPESFFSKLYKVPLDTTEYPEEQYVSDILNYIDHGDPQVRGATAILCGTLICSILSRSRFHVGDWMGTIRTLTGNTFSLADCIPLLRKTLKDESSVTCKLACTAVRNCVMSLCSSSYSELGLQLIIDVLTLRNSSYWLVRTELLETLAEIDFRLVSFLEAKAENLHRGAHHYTGLLKLQERVLNNVVIHLLGDEDPRVRHVAAASLIRLVPKLFYKCDQGQADPVVAVARDQSSVYLKLLMHETQPPSHFSVSTITRIYRGYNLLPSITDVTMENNLSRVIAAVSHELITSTTRALTFGCCEALCLLSTAFPVCIWSLGWHCGVPPLSASDESRKSCTVGMATMILTLLSSAWFPLDLSAHQDALILAGNLLAASAPKSLRSSWASEEEANPAATKQEEVWPALGDRALVPMVEQLFSHLLKVINICAHVLDDVAPGPAIKAALPSLTNPPSLSPIRRKGKEKEPGEQASVPLSPKKGSEASAASRQSDTSGPVTTSKSSSLGSFYHLPSYLKLHDVLKATHANYKVTLDLQNSTEKFGGFLRSALDVLSQILELATLQDIGKCVEEILGYLKSCFSREPMMATVCVQQLLKTLFGTNLASQFDGLSSNPSKSQGRAQRLGSSSVRPGLYHYCFMAPYTHFTQALADASLRNMVQAEQENDTSGWFDVLQKVSTQLKTNLTSVTKNRADKNAIHNHIRLFEPLVIKALKQYTTTTCVQLQKQVLDLLAQLVQLRVNYCLLDSDQVFIGFVLKQFEYIEVGQFRESEAIIPNIFFFLVLLSYERYHSKQIIGIPKIIQLCDGIMASGRKAVTHAIPALQPIVHDLFVLRGTNKADAGKELETQKEVVVSMLLRLIQYHQVLEMFILVLQQCHKENEDKWKRLSRQIADIILPMLAKQQMHIDSHEALGVLNTLFEILAPSSLRPVDMLLRSMFVTPNTMASVSTVQLWISGILAILRVLISQSTEDIVLSRIQELSFSPYLISCTVINRLRDGDSTSTLEEHSEGKQIKNLPEETFSRFLLQLVGILLEDIVTKQLKVEMSEQQHTFYCQELGTLLMCLIHIFKSGMFRRITAAATRLFRSDGCGGSFYTLDSLNLRARSMITTHPALVLLWCQILLLVNHTDYRWWAEVQQTPKRHSLSSTKLLSPQMSGEEEDSDLAAKLGMCNREIVRRGALILFCDYVCQNLHDSEHLTWLIVNHIQDLISLSHEPPVQDFISAVHRNSAASGLFIQAIQSRCENLSTPTMLKKTLQCLEGIHLSQSGAVLTLYVDRLLCTPFRVLARMVDILACRRVEMLLAANLQSSMAQLPMEELNRIQEYLQSSGLAQRHQRLYSLLDRFRLSTMQDSLSPSPPVSSHPLDGDGHVSLETVSPDKDWYVHLVKSQCWTRSDSALLEGAELVNRIPAEDMNAFMMNSEFNLSLLAPCLSLGMSEISGGQKSALFEAAREVTLARVSGTVQQLPAVHHVFQPELPAEPAAYWSKLNDLFGDAALYQSLPTLARALAQYLVVVSKLPSHLHLPPEKEKDIVKFVVATLEALSWHLIHEQIPLSLDLQAGLDCCCLALQLPGLWSVVSSTEFVTHACSLIYCVHFILEAVAVQPGEQLLSPERRTNTPKAISEEEEEVDPNTQNPKYITAACEMVAEMVESLQSVLALGHKRNSGVPAFLTPLLRNIIISLARLPLVNSYTRVPPLVWKLGWSPKPGGDFGTAFPEIPVEFLQEKEVFKEFIYRINTLGWTSRTQFEETWATLLGVLVTQPLVMEQEESPPEEDTERTQINVLAVQAITSLVLSAMTVPVAGNPAVSCLEQQPRNKPLKALDTRFGRKLSIIRGIVEQEIQAMVSKRENIATHHLYQAWDPVPSLSPATTGALISHEKLLLQINPERELGSMSYKLGQVSIHSVWLGNSITPLREEEWDEEEEEEADAPAPSSPPTSPVNSRKHRAGVDIHSCSQFLLELYSRWILPSSSARRTPAILISEVVRSLLVVSDLFTERNQFELMYVTLTELRRVHPSEDEILAQYLVPATCKAAAVLGMDKAVAEPVSRLLESTLRSSHLPSRVGALHGVLYVLECDLLDDTAKQLIPVISDYLLSNLKGIAHCVNIHSQQHVLVMCATAFYLIENYPLDVGPEFSASIIQMCGVMLSGSEESTPSIIYHCALRGLERLLLSEQLSRLDAESLVKLSVDRVNVHSPHRAMAALGLMLTCMYTGKEKVSPGRTSDPNPAAPDSESVIVAMERVSVLFDRIRKGFPCEARVVARILPQFLDDFFPPQDIMNKVIGEFLSNQQPYPQFMATVVYKVFQTLHSTGQSSMVRDWVMLSLSNFTQRAPVAMATWSLSCFFVSASTSPWVAAILPHVISRMGKLEQVDVNLFCLVATDFYRHQIEEELDRRAFQSVLEVVAAPGSPYHRLLTCLRNVHKVTTC

SEQ ID NO: 48 - protein, 89 aa, Homo sapiens
MGILKLQVFLIVLSVALNHLKATPIESHQVEKRKCNTATCATQRLANFLVHSSNNFGAILSSTNVGSNTYGKRNAVEVLKREPLNYLPL

SEQ ID NO: 49 - protein, 776 aa, Homo sapiens
MAEPRQEFEVMEDHAGTYGLGDRKDQGGYTMHQDQEGDTDAGLKESPLQTPTEDGSEEPGSETSDAKSTPTAEDVTAPLVDEGAPGKQAAAQPHTEIPEGTTAEEAGIGDTPSLEDEAAGHVTQEPESGKVVQEGFLREPGPPGLSHQLMSGMPGAPLLPEGPREATRQPSGTGPEDTEGGRHAPELLKHQLLGDLHQEGPPLKGAGGKERPGSKEEVDEDRDVDESSPQDSPPSKASPAQDGRPPQTAAREATSIPGFPAEGAIPLPVDFLSKVSTEIPASEPDGPSVGRAKGQDAPLEFTFHVEITPNVQKEQAHSEEHLGRAAFPGAPGEGPEARGPSLGEDTKEADLPEPSEKQPAAAPRGKPVSRVPQLKARMVSKSKDGTGSDDKKAKTSTRSSAKTLKNRPCLSPKHPTPGSSDPLIQPSSPAVCPEPPSSPKYVSSVTSRTGSSGAKEMKLKGADGKTKIATPRGAAPPGQKGQANATRIPAKTPPAPKTPPSSATKQVQRRPPPAGPRSERGEPPKSGDRSGYSSPGSPGTPGSRSRTPSLPTPPTREPKKVAVVRTPPKSPSSAKSRLQTAPVPMPDLKNVKSKIGSTENLKHQPGGGKVQIINKKLDLSNVQSKCGSKDNIKHVPGGGSVQIVYKPVDLSKVTSKCGSLGNIHHKPGGGQVEVKSEKLDFKDRVQSKIGSLDNITHVPGGGNKKIETHKLTFRENAKAKTDHGAEIVYKSPVVSGDTSPRHLSNVSSTGSIDMVDSPQLATLADEVSASLAKQGL

SEQ ID NO: 50 - protein, 253 aa, Homo sapiens
MANLGCWMLVLFVATWSDLGLCKKRPKPGGWNTGGSRYPGQGSPGGNRYPPQGGGGWGQPHGGGWGQPHGGGWGQPHGGGWGQPHGGGWGQGGGTHSQWNKPSKPKTNMKHMAGAAAAGAVVGGLGGYMLGSAMSRPIIHFGSDYEDRYYRENMHRYPNQVYYRPMDEYSNQNNFVHDCVNITIKQHTVTTTTKGENFTETDVKMMERVVEQMCITQYERESQAYYQRGSSMVLFSSPPVILLISFLIFLIVG

SEQ ID NO: 51 - protein, 140 aa, Homo sapiens
MDVFMKGLSKAKEGVVAAAEKTKQGVAEAAGKTKEGVLYVGSKTKEGVVHGVATVAEKTKEQVTNVGGAVVTGVTAVAQKTVEGAGSIAAATGFVKKDQLGKNEEGAPQEGILEDMPVDPDNEAYEMPSEEGYQDYEPEA

SEQ ID NO: 52 - protein, 140 aa, Homo sapiens; identical to SEQ ID NO: 51

SEQ ID NO: 53 - protein, 196 aa, Homo sapiens
QLVKSELEEKKSELRHKLKYVPHEYIELIEIARNSTQDRILEMKVMEFFMKVYGYRGKHLGGSRKPDGAIYTVGSPIDYGVIVDTKAYSGGYNLPIGQADEMQRYVEENQTRNKHINPNEWWKVYPSSVTEFKFLFVSGHFKGNYKAQLTRLNHITNCNGAVLSVEELLIGGEMIKAGTLTLEEVRRKFNNGEINF

SEQ ID NO: 54 - protein, 36 aa, Homo sapiens
  misc_feature (12)..(13): Xaa can be any naturally occurring amino acid
LTPEQVVAIASXXGGKQALETVQRLLPVLCQAHGGG

SEQ ID NO: 55 - protein, 36 aa, Homo sapiens
  misc_feature (12)..(13): Xaa can be any naturally occurring amino acid
LTPEQVVAIASXXGGKQALETVQRLLPVLCQAGHGG

SEQ ID NO: 56 - protein, 36 aa, Homo sapiens
  misc_feature (12)..(13): Xaa can be any naturally occurring amino acid
LTPEQVVAIASXXGGKQALETVQRLLPVLCQAHGSG

SEQ ID NO: 57 - protein, 1089 aa, Homo sapiens
  misc_feature (188)..(189): Xaa can be any naturally occurring amino acid
  misc_feature (224)..(225): Xaa can be any naturally occurring amino acid
  misc_feature (258)..(259): Xaa can be any naturally occurring amino acid
  misc_feature (294)..(295): Xaa can be any naturally occurring amino acid
  misc_feature (328)..(329): Xaa can be any naturally occurring amino acid
  misc_feature (364)..(365): Xaa can be any naturally occurring amino acid
  misc_feature (398)..(399): Xaa can be any naturally occurring amino acid
  misc_feature (434)..(435): Xaa can be any naturally occurring amino acid
  misc_feature (468)..(469): Xaa can be any naturally occurring amino acid
  misc_feature (504)..(505): Xaa can be any naturally occurring amino acid
  misc_feature (538)..(539): Xaa can be any naturally occurring amino acid
  misc_feature (574)..(575): Xaa can be any naturally occurring amino acid
  misc_feature (608)..(609): Xaa can be any naturally occurring amino acid
  misc_feature (644)..(645): Xaa can be any naturally occurring amino acid
  misc_feature (678)..(679): Xaa can be any naturally occurring amino acid
  misc_feature (714)..(715): Xaa can be any naturally occurring amino acid
  misc_feature (748)..(749): Xaa can be any naturally occurring amino acid
  misc_feature (784)..(785): Xaa can be any naturally occurring amino acid
  misc_feature (818)..(819): Xaa can be any naturally occurring amino acid
MDYKDHDGDYKDHDIDYKDDDDKMAPKKKRKVGIHGVPAAVDLRTLGYSQQQQEKIKPKVRSTVAQHHEALVGHGFTHAHIVALSQHPAALGTVAVKYQDMIAALPEATHEAIVGVGKQWSGARALEALLTVAGELRGPPLQLDTGQLLKIAKRGGVTAVEAVHAWRNALTGAPLNLTPEQVVAIASXXGGKQALETVQRLLPVLCQAGHGGLTPEQVVAIASXXGGKQALETVQRLLPVLCQAHGLTPEQVVAIASXXGGKQALETVQRLLPVLCQAGHGGLTPEQVVAIASXXGGKQALETVQRLLPVLCQAHGLTPEQVVAIASXXGGKQALETVQRLLPVLCQAGHGGLTPEQVVAIASXXGGKQALETVQRLLPVLCQAHGLTPEQVVAIASXXGGKQALETVQRLLPVLCQAGHGGLTPEQVVAIASXXGGKQALETVQRLLPVLCQAHGLTPEQVVAIASXXGGKQALETVQRLLPVLCQAGHGGLTPEQVVAIASXXGGKQALETVQRLLPVLCQAHGLTPEQVVAIASXXGGKQALETVQRLLPVLCQAGHGGLTPEQVVAIASXXGGKQALETVQRLLPVLCQAHGLTPEQVVAIASXXGGKQALETVQRLLPVLCQAGHGGLTPEQVVAIASXXGGKQALETVQRLLPVLCQAHGLTPEQVVAIASXXGGKQALETVQRLLPVLCQAGHGGLTPEQVVAIASXXGGKQALETVQRLLPVLCQAHGLTPEQVVAIASXXGGKQALETVQRLLPVLCQAGHGGLTPEQVVAIASXXGGKQALETVQRLLPVLCQAHGLTPEQVVAIASXXGGRPALESIVAQLSRPDPALAALTNDHLVALACLGGRPALDAVKKGLPHAPALIKRTNRRIPERTSHRVAGSQLVKSELEEKKSELRHKLKYVPHEYIELIEIARNSTQDRILEMKVMEFFMKVYGYRGKHLGGSRKPDGAIYTVGSPIDYGVIVDTKAYSGGYNLPIGQADEMQRYVEENQTRNKHINPNEWWKVYPSSVTEFKFLFVSGHFKGNYKAQLTRLNHITNCNGAVLSVEELLIGGEMIKAGTLTLEEVRRKFNNGEINFRS

SEQ ID NO: 58 - protein, 1107 aa, Homo sapiens
  misc_feature (188)..(189): Xaa can be any naturally occurring amino acid
  misc_feature (224)..(225): Xaa can be any naturally occurring amino acid
  misc_feature (260)..(261): Xaa can be any naturally occurring amino acid
  misc_feature (296)..(297): Xaa can be any naturally occurring amino acid
  misc_feature (332)..(333): Xaa can be any naturally occurring amino acid
  misc_feature (368)..(369): Xaa can be any naturally occurring amino acid
  misc_feature (404)..(405): Xaa can be any naturally occurring amino acid
  misc_feature (440)..(441): Xaa can be any naturally occurring amino acid
  misc_feature (476)..(477): Xaa can be any naturally occurring amino acid
  misc_feature (512)..(513): Xaa can be any naturally occurring amino acid
  misc_feature (548)..(549): Xaa can be any naturally occurring amino acid
  misc_feature (584)..(585): Xaa can be any naturally occurring amino acid
  misc_feature (620)..(621): Xaa can be any naturally occurring amino acid
  misc_feature (656)..(657): Xaa can be any naturally occurring amino acid
  misc_feature (692)..(693): Xaa can be any naturally occurring amino acid
  misc_feature (728)..(729): Xaa can be any naturally occurring amino acid
  misc_feature (764)..(765): Xaa can be any naturally occurring amino acid
  misc_feature (800)..(801): Xaa can be any naturally occurring amino acid
  misc_feature (836)..(837): Xaa can be any naturally occurring amino acid
MDYKDHDGDYKDHDIDYKDDDDKMAPKKKRKVGIHGVPAAVDLRTLGYSQQQQEKIKPKVRSTVAQHHEALVGHGFTHAHIVALSQHPAALGTVAVKYQDMIAALPEATHEAIVGVGKQWSGARALEALLTVAGELRGPPLQLDTGQLLKIAKRGGVTAVEAVHAWRNALTGAPLNLTPEQVVAIASXXGGKQALETVQRLLPVLCQAGHGGLTPEQVVAIASXXGGKQALETVQRLLPVLCQAGHGGLTPEQVVAIASXXGGKQALETVQRLLPVLCQAGHGGLTPEQVVAIASXXGGKQALETVQRLLPVLCQAGHGGLTPEQVVAIASXXGGKQALETVQRLLPVLCQAGHGGLTPEQVVAIASXXGGKQALETVQRLLPVLCQAGHGGLTPEQVVAIASXXGGKQALETVQRLLPVLCQAGHGGLTPEQVVAIASXXGGKQALETVQRLLPVLCQAGHGGLTPEQVVAIASXXGGKQALETVQRLLPVLCQAGHGGLTPEQVVAIASXXGGKQALETVQRLLPVLCQAGHGGLTPEQVVAIASXXGGKQALETVQRLLPVLCQAGHGGLTPEQVVAIASXXGGKQALETVQRLLPVLCQAGHGGLTPEQVVAIASXXGGKQALETVQRLLPVLCQAGHGGLTPEQVVAIASXXGGKQALETVQRLLPVLCQAGHGGLTPEQVVAIASXXGGKQALETVQRLLPVLCQAGHGGLTPEQVVAIASXXGGKQALETVQRLLPVLCQAGHGGLTPEQVVAIASXXGGKQALETVQRLLPVLCQAGHGGLTPEQVVAIASXXGGKQALETVQRLLPVLCQAGHGGLTPEQVVAIASXXGGRPALESIVAQLSRPDPALAALTNDHLVALACLGGRPALDAVKKGLPHAPALIKRTNRRIPERTSHRVAGSQLVKSELEEKKSELRHKLKYVPHEYIELIEIARNSTQDRILEMKVMEFFMKVYGYRGKHLGGSRKPDGAIYTVGSPIDYGVIVDTKAYSGGYNLPIGQADEMQRYVEENQTRNKHINPNEWWKVYPSSVTEFKFLFVSGHFKGNYKAQLTRLNHITNCNGAVLSVEELLIGGEMIKAGTLTLEEVRRKFNNGEINFRS

SEQ ID NO: 59 - protein, 1086 aa, Homo sapiens
  misc_feature (188)..(189): Xaa can be any naturally occurring amino acid
  misc_feature (224)..(225): Xaa can be any naturally occurring amino acid
  misc_feature (258)..(259): Xaa can be any naturally occurring amino acid
  misc_feature (294)..(295): Xaa can be any naturally occurring amino acid
  misc_feature (328)..(329): Xaa can be any naturally occurring amino acid
  misc_feature (364)..(365): Xaa can be any naturally occurring amino acid
  misc_feature (398)..(399): Xaa can be any naturally occurring amino acid
  misc_feature (434)..(435): Xaa can be any naturally occurring amino acid
  misc_feature (468)..(469): Xaa can be any naturally occurring amino acid
  misc_feature (504)..(505): Xaa can be any naturally occurring amino acid
  misc_feature (538)..(539): Xaa can be any naturally occurring amino acid
  misc_feature (574)..(575): Xaa can be any naturally occurring amino acid
  misc_feature (608)..(609): Xaa can be any naturally occurring amino acid
  misc_feature (644)..(645): Xaa can be any naturally occurring amino acid
  misc_feature (678)..(679): Xaa can be any naturally occurring amino acid
  misc_feature (714)..(715): Xaa can be any naturally occurring amino acid
  misc_feature (748)..(749): Xaa can be any naturally occurring amino acid
  misc_feature (784)..(785): Xaa can be any naturally occurring amino acid
  misc_feature (818)..(819): Xaa can be any naturally occurring amino acid
MDYKDHDGDYKDHDIDYKDDDDKMAPKKKRKVGIHGVPAAVDLRTLGYSQQQQEKIKPKVRSTVAQHHEALVGHGFTHAHIVALSQHPAALGTVAVKYQDMIAALPEATHEAIVGVGKQWSGARALEALLTVAGELRGPPLQLDTGQLLKIAKRGGVTAVEAVHAWRNALTGAPLNLTPEQVVAIASXXGGKQALETVQRLLPVLCQAGHGGLTPEQVVAIASXXGGKQALETVQRLLPVLCQAHGLTPEQVVAIASXXGGKQALETVQRLLPVLCQAGHGGLTPEQVVAIASXXGGKQALETVQRLLPVLCQAHGLTPEQVVAIASXXGGKQALETVQRLLPVLCQAGHGGLTPEQVVAIASXXGGKQALETVQRLLPVLCQAHGLTPEQVVAIASXXGGKQALETVQRLLPVLCQAGHGGLTPEQVVAIASXXGGKQALETVQRLLPVLCQAHGLTPEQVVAIASXXGGKQALETVQRLLPVLCQAGHGGLTPEQVVAIASXXGGKQALETVQRLLPVLCQAHGLTPEQVVAIASXXGGKQALETVQRLLPVLCQAGHGGLTPEQVVAIASXXGGKQALETVQRLLPVLCQAHGLTPEQVVAIASXXGGKQALETVQRLLPVLCQAGHGGLTPEQVVAIASXXGGKQALETVQRLLPVLCQAHGLTPEQVVAIASXXGGKQALETVQRLLPVLCQAGHGGLTPEQVVAIASXXGGKQALETVQRLLPVLCQAHGLTPEQVVAIASXXGGKQALETVQRLLPVLCQAGHGGLTPEQVVAIASXXGGKQALETVQRLLPVLCQAHGLTPEQVVAIASXXGGRPALESIVAQLSRPDPALAALTNDHLVALACLGGRPALDAVKKGLPHAPALIKRTNRRIPERTSHRVAGSVLEKSDIEKFKNQLRTELTNIDHSYLKGIDIASKKKTSNVENTEFEAISTKIFTDELGFSGKHLGGSNKPDGLLWDDDCAIILDSKAYSEGFPLTASHTDAMGRYLRQFTERKEEIKPTWWDIAPEHLDNTYFAYVSGSFSGNYKEQLQKFRQDTNHLGGALEFVKLLLLANNYKTQKMSKKEVKKSILDYNISY

SEQ ID NO: 60 - protein, 1104 aa, Homo sapiens
  misc_feature (188)..(189): Xaa can be any naturally occurring amino acid
  misc_feature (224)..(225): Xaa can be any naturally occurring amino acid
  misc_feature (260)..(261): Xaa can be any naturally occurring amino acid
  misc_feature (296)..(297): Xaa can be any naturally occurring amino acid
  misc_feature (332)..(333): Xaa can be any naturally occurring amino acid
  misc_feature (368)..(369): Xaa can be any naturally occurring amino acid
  misc_feature (404)..(405): Xaa can be any naturally occurring amino acid
  misc_feature (440)..(441): Xaa can be any naturally occurring amino acid
  misc_feature (476)..(477): Xaa can be any naturally occurring amino acid
  misc_feature (512)..(513): Xaa can be any naturally occurring amino acid
  misc_feature (548)..(549): Xaa can be any naturally occurring amino acid
  misc_feature (584)..(585): Xaa can be any naturally occurring amino acid
  misc_feature (620)..(621): Xaa can be any naturally occurring amino acid
  misc_feature (656)..(657): Xaa can be any naturally occurring amino acid
  misc_feature (692)..(693): Xaa can be any naturally occurring amino acid
  misc_feature (728)..(729): Xaa can be any naturally occurring amino acid
  misc_feature (764)..(765): Xaa can be any naturally occurring amino acid
  misc_feature (800)..(801): Xaa can be any naturally occurring amino acid
  misc_feature (836)..(837): Xaa can be any naturally occurring amino acid
MDYKDHDGDYKDHDIDYKDDDDKMAPKKKRKVGIHGVPAAVDLRTLGYSQQQQEKIKPKVRSTVAQHHEALVGHGFTHAHIVALSQHPAALGTVAVKYQDMIAALPEATHEAIVGVGKQWSGARALEALLTVAGELRGPPLQLDTGQLLKIAKRGGVTAVEAVHAWRNALTGAPLNLTPEQVVAIASXXGGKQALETVQRLLPVLCQAGHGGLTPEQVVAIASXXGGKQALETVQRLLPVLCQAGHGGLTPEQVVAIASXXGGKQALETVQRLLPVLCQAGHGGLTPEQVVAIASXXGGKQALETVQRLLPVLCQAGHGGLTPEQVVAIASXXGGKQALETVQRLLPVLCQAGHGGLTPEQVVAIASXXGGKQALETVQRLLPVLCQAGHGGLTPEQVVAIASXXGGKQALETVQRLLPVLCQAGHGGLTPEQVVAIASXXGGKQALETVQRLLPVLCQAGHGGLTPEQVVAIASXXGGKQALETVQRLLPVLCQAGHGGLTPEQVVAIASXXGGKQALETVQRLLPVLCQAGHGGLTPEQVVAIASXXGGKQALETVQRLLPVLCQAGHGGLTPEQVVAIASXXGGKQALETVQRLLPVLCQAGHGGLTPEQVVAIASXXGGKQALETVQRLLPVLCQAGHGGLTPEQVVAIASXXGGKQALETVQRLLPVLCQAGHGGLTPEQVVAIASXXGGKQALETVQRLLPVLCQAGHGGLTPEQVVAIASXXGGKQALETVQRLLPVLCQAGHGGLTPEQVVAIASXXGGKQALETVQRLLPVLCQAGHGGLTPEQVVAIASXXGGKQALETVQRLLPVLCQAGHGGLTPEQVVAIASXXGGRPALESIVAQLSRPDPALAALTNDHLVALACLGGRPALDAVKKGLPHAPALIKRTNRRIPERTSHRVAGSVLEKSDIEKFKNQLRTELTNIDHSYLKGIDIASKKKTSNVENTEFEAISTKIFTDELGFSGKHLGGSNKPDGLLWDDDCAIILDSKAYSEGFPLTASHTDAMGRYLRQFTERKEEIKPTWWDIAPEHLDNTYFAYVSGSFSGNYKEQLQKFRQDTNHLGGALEFVKLLLLANNYKTQKMSKKEVKKSILDYNISY

SEQ ID NO: 61 - protein, 1464 aa, Homo sapiens
MFSFVDLRLLLLLAATALLTHGQEEGQVEGQDEDIPPITCVQNGLRYHDRDVWKPEPCRICVCDNGKVLCDDVICDETKNCPGAEVPEGECCPVCPDGSESPTDQETTGVEGPKGDTGPRGPRGPAGPPGRDGIPGQPGLPGPPGPPGPPGPPGLGGNFAPQLSYGYDEKSTGGISVPGPMGPSGPRGLPGPPGAPGPQGFQGPPGEPGEPGASGPMGPRGPPGPPGKNGDDGEAGKPGRPGERGPPGPQGARGLPGTAGLPGMKGHRGFSGLDGAKGDAGPAGPKGEPGSPGENGAPGQMGPRGLPGERGRPGAPGPAGARGNDGATGAAGPPGPTGPAGPPGFPGAVGAKGEAGPQGPRGSEGPQGVRGEPGPPGPAGAAGPAGNPGADGQPGAKGANGAPGIAGAPGFPGARGPSGPQGPGGPPGPKGNSGEPGAPGSKGDTGAKGEPGPVGVQGPPGPAGEEGKRGARGEPGPTGLPGPPGERGGPGSRGFPGADGVAGPKGPAGERGSPGPAGPKGSPGEAGRPGEAGLPGAKGLTGSPGSPGPDGKTGPPGPAGQDGRPGPPGPPGARGQAGVMGFPGPKGAAGEPGKAGERGVPGPPGAVGPAGKDGEAGAQGPPGPAGPAGERGEQGPAGSPGFQGLPGPAGPPGEAGKPGEQGVPGDLGAPGPSGARGERGFPGERGVQGPPGPAGPRGANGAPGNDGAKGDAGAPGAPGSQGAPGLQGMPGERGAAGLPGPKGDRGDAGPKGADGSPGKDGVRGLTGPIGPPGPAGAPGDKGESGPSGPAGPTGARGAPGDRGEPGPPGPAGFAGPPGADGQPGAKGEPGDAGAKGDAGPPGPAGPAGPPGPIGNVGAPGAKGARGSAGPPGATGFPGAAGRVGPPGPSGNAGPPGPPGPAGKEGGKGPRGETGPAGRPGEVGPPGPPGPAGEKGSPGADGPAGAPGTPGPQGIAGQRGVVGLPGQRGERGFPGLPGPSGEPGKQGPSGASGERGPPGPMGPPGLAGPPGESGREGAPGAEGSPGRDGSPGAKGDRGETGPAGPPGAPGAPGAPGPVGPAGKSGDRGETGPAGPAGPVGPVGARGPAGPQGPRGDKGETGEQGDRGIKGHRGFSGLQGPPGPPGSPGEQGPSGASGPAGPRGPPGSAGAPGKDGLNGLPGPIGPPGPRGRTGDAGPVGPPGPPGPPGPPGPPSAGFDFSFLPQPPQEKAHDGGRYYRADDANVVRDRDLEVDTTLKSLSQQIENIRSPEGSRKNPARTCRDLKMCHSDWKSGEYWIDPNQGCNLDAIKVFCNMETGETCVYPTQPSVAQKNWYISKNPKDKRHVWFGESMTDGFQFEYGGQGSDPADVAIQLTFLRLMSTEASQNITYHCKNSVAYMDQQTGNLKKALLLQGSNEIEIRAEGNSRFTYSVTVDGCTSHTGAWGKTVIEYKTTKTSRLPIIDVAPLDVGAPDQEFGFDVGPVCFL

SEQ ID NO: 62 - protein, 1366 aa, Homo sapiens
MLSFVDTRTLLLLAVTLCLATCQSLQEETVRKGPAGDRGPRGERGPPGPPGRDGEDGPTGPPGPPGPPGPPGLGGNFAAQYDGKGVGLGPGPMGLMGPRGPPGAAGAPGPQGFQGPAGEPGEPGQTGPAGARGPAGPPGKAGEDGHPGKPGRPGERGVVGPQGARGFPGTPGLPGFKGIRGHNGLDGLKGQPGAPGVKGEPGAPGENGTPGQTGARGLPGERGRVGAPGPAGARGSDGSVGPVGPAGPIGSAGPPGFPGAPGPKGEIGAVGNAGPAGPAGPRGEVGLPGLSGPVGPPGNPGANGLTGAKGAAGLPGVAGAPGLPGPRGIPGPVGAAGATGARGLVGEPGPAGSKGESGNKGEPGSAGPQGPPGPSGEEGKRGPNGEAGSAGPPGPPGLRGSPGSRGLPGADGRAGVMGPPGSRGASGPAGVRGPNGDAGRPGEPGLMGPRGLPGSPGNIGPAGKEGPVGLPGIDGRPGPIGPAGARGEPGNIGFPGPKGPTGDPGKNGDKGHAGLAGARGAPGPDGNNGAQGPPGPQGVQGGKGEQGPPGPPGFQGLPGPSGPAGEVGKPGERGLHGEFGLPGPAGPRGERGPPGESGAAGPTGPIGSRGPSGPPGPDGNKGEPGVVGAVGTAGPSGPSGLPGERGAAGIPGGKGEKGEPGLRGEIGNPGRDGARGAPGAVGAPGPAGATGDRGEAGAAGPAGPAGPRGSPGERGEVGPAGPNGFAGPAGAAGQPGAKGERGAKGPKGENGVVGPTGPVGAAGPAGPNGPPGPAGSRGDGGPPGMTGFPGAAGRTGPPGPSGISGPPGPPGPAGKEGLRGPRGDQGPVGRTGEVGAVGPPGFAGEKGPSGEAGTAGPPGTPGPQGLLGAPGILGLPGSRGERGLPGVAGAVGEPGPLGIAGPPGARGPPGAVGSPGVNGAPGEAGRDGNPGNDGPPGRDGQPGHKGERGYPGNIGPVGAAGAPGPHGPVGPAGKHGNRGETGPSGPVGPAGAVGPRGPSGPQGIRGDKGEPGEKGPRGLPGLKGHNGLQGLPGIAGHHGDQGAPGSVGPAGPRGPAGPSGPAGKDGRTGHPGTVGPAGIRGPQGHQGPAGPPGPPGPPGPPGVSGGGYDFGYDGDFYRADQPRSAPSLRPKDYEVDATLKSLNNQIETLLTPEGSRKNPARTCRDLRLSHPEWSSGYYWIDPNQGCTMDAIKVYCDFSTGETCIRAQPENIPAKNWYRSSKDKKHVWLGETINAGSQFEYNVEGVTSKEMATQLAFMRLLANYASQNITYHCKNSIAYMDEETGNLKKAVILQGSNDVELVAEGNSRFTYTVLVDGCSKKTNEWGKTIIEYKTNKPSRLPFLDIAPLDIGGADQEFFVDIGPVCFK

SEQ ID NO: 63 - protein, 1487 aa, Homo sapiens
MIRLGAPQTLVLLTLLVAAVLRCQGQDVQEAGSCVQDGQRYNDKDVWKPEPCRICVCDTGTVLCDDIICEDVKDCLSPEIPFGECCPICPTDLATASGQPGPKGQKGEPGDIKDIVGPKGPPGPQGPAGEQGPRGDRGDKGEKGAPGPRGRDGEPGTPGNPGPPGPPGPPGPPGLGGNFAAQMAGGFDEKAGGAQLGVMQGPMGPMGPRGPPGPAGAPGPQGFQGNPGEPGEPGVSGPMGPRGPPGPPGKPGDDGEAGKPGKAGERGPPGPQGARGFPGTPGLPGVKGHRGYPGLDGAKGEAGAPGVKGESGSPGENGSPGPMGPRGLPGERGRTGPAGAAGARGNDGQPGPAGPPGPVGPAGGPGFPGAPGAKGEAGPTGARGPEGAQGPRGEPGTPGSPGPAGASGNPGTDGIPGAKGSAGAPGIAGAPGFPGPRGPPGPQGATGPLGPKGQTGEPGIAGFKGEQGPKGEPGPAGPQGAPGPAGEEGKRGARGEPGGVGPIGPPGERGAPGNRGFPGQDGLAGPKGAPGERGPSGLAGPKGANGDPGRPGEPGLPGARGLTGRPGDAGPQGKVGPSGAPGEDGRPGPPGPQGARGQPGVMGFPGPKGANGEPGKAGEKGLPGAPGLRGLPGKDGETGAAGPPGPAGPAGERGEQGAPGPSGFQGLPGPPGPPGEGGKPGDQGVPGEAGAPGLVGPRGERGFPGERGSPGAQGLQGPRGLPGTPGTDGPKGASGPAGPPGAQGPPGLQGMPGERGAAGIAGPKGDRGDVGEKGPEGAPGKDGGRGLTGPIGPPGPAGANGEKGEVGPPGPAGSAGARGAPGERGETGPPGPAGFAGPPGADGQPGAKGEQGEAGQKGDAGAPGPQGPSGAPGPQGPTGVTGPKGARGAQGPPGATGFPGAAGRVGPPGSNGNPGPPGPPGPSGKDGPKGARGDSGPPGRAGEPGLQGPAGPPGEKGEPGDDGPSGAEGPPGPQGLAGQRGIVGLPGQRGERGFPGLPGPSGEPGKQGAPGASGDRGPPGPVGPPGLTGPAGEPGREGSPGADGPPGRDGAAGVKGDRGETGAVGAPGAPGPPGSPGPAGPTGKQGDRGEAGAQGPMGPSGPAGARGIQGPQGPRGDKGEAGEPGERGLKGHRGFTGLQGLPGPPGPSGDQGASGPAGPSGPRGPPGPVGPSGKDGANGIPGPIGPPGPRGRSGETGPAGPPGNPGPPGPPGPPGPGIDMSAFAGLGPREKGPDPLQYMRADQAAGGLRQHDAEVDATLKSLNNQIESIRSPEGSRKNPARTCRDLKLCHPEWKSGDYWIDPNQGCTLDAMKVFCNMETGETCVYPNPANVPKKNWWSSKSKEKKHIWFGETINGGFHFSYGDDNLAPNTANVQMTFLRLLSTEGSQNITYHCKNSIAYLDEAAGNLKKALLIQGSNDVEIRAEGNSRFTYTALKDGCTKHTGKWGKTVIEYRSQKTSRLPIIDIAPMDIGGPEQEFGVDIGPVCFL

SEQ ID NO: 64 - protein, 1418 aa, Homo sapiens
MIRLGAPQTLVLLTLLVAAVLRCQGQDVRQPGPKGQKGEPGDIKDIVGPKGPPGPQGPAGEQGPRGDRGDKGEKGAPGPRGRDGEPGTPGNPGPPGPPGPPGPPGLGGNFAAQMAGGFDEKAGGAQLGVMQGPMGPMGPRGPPGPAGAPGPQGFQGNPGEPGEPGVSGPMGPRGPPGPPGKPGDDGEAGKPGKAGERGPPGPQGARGFPGTPGLPGVKGHRGYPGLDGAKGEAGAPGVKGESGSPGENGSPGPMGPRGLPGERGRTGPAGAAGARGNDGQPGPAGPPGPVGPAGGPGFPGAPGAKGEAGPTGARGPEGAQGPRGEPGTPGSPGPAGASGNPGTDGIPGAKGSAGAPGIAGAPGFPGPRGPPGPQGATGPLGPKGQTGEPGIAGFKGEQGPKGEPGPAGPQGAPGPAGEEGKRGARGEPGGVGPIGPPGERGAPGNRGFPGQDGLAGPKGAPGERGPSGLAGPKGANGDPGRPGEPGLPGARGLTGRPGDAGPQGKVGPSGAPGEDGRPGPPGPQGARGQPGVMGFPGPKGANGEPGKAGEKGLPGAPGLRGLPGKDGETGAAGPPGPAGPAGERGEQGAPGPSGFQGLPGPPGPPGEGGKPGDQGVPGEAGAPGLVGPRGERGFPGERGSPGAQGLQGPRGLPGTPGTDGPKGASGPAGPPGAQGPPGLQGMPGERGAAGIAGPKGDRGDVGEKGPEGAPGKDGGRGLTGPIGPPGPAGANGEKGEVGPPGPAGSAGARGAPGERGETGPPGPAGFAGPPGADGQPGAKGEQGEAGQKGDAGAPGPQGPSGAPGPQGPTGVTGPKGARGAQGPPGATGFPGAAGRVGPPGSNGNPGPPGPPGPSGKDGPKGARGDSGPPGRAGEPGLQGPAGPPGEKGEPGDDGPSGAEGPPGPQGLAGQRGIVGLPGQRGERGFPGLPGPSGEPGKQGAPGASGDRGPPGPVGPPGLTGPAGEPGREGSPGADGPPGRDGAAGVKGDRGETGAVGAPGAPGPPGSPGPAGPTGKQGDRGEAGAQGPMGPSGPAGARGIQGPQGPRGDKGEAGEPGERGLKGHRGFTGLQGLPGPPGPSGDQGASGPAGPSGPRGPPGPVGPSGKDGANGIPGPIGPPGPRGRSGETGPAGPPGNPGPPGPPGPPGPGIDMSAFAGLGPREKGPDPLQYMRADQAAGGLRQHDAEVDATLKSLNNQIESIRSPEGSRKNPARTCRDLKLCHPEWKSGDYWIDPNQGCTLDAMKVFCNMETGETCVYPNPANVPKKNWWSSKSKEKKHIWFGETINGGFHFSYGDDNLAPNTANVQMTFLRLLSTEGSQNITYHCKNSIAYLDEAAGNLKKALLIQGSNDVEIRAEGNSRFTYTALKDGCTKHTGKWGKTVIEYRSQKTSRLPIIDIAPMDIGGPEQEFGVDIGPVCFL

SEQ ID NO: 65 - protein, 1466 aa, Homo sapiens
MMSFVQKGSWLLLALLHPTIILAQQEAVEGGCSHLGQSYADRDVWKPEPCQICVCDSGSVLCDDIICDDQELDCPNPEIPFGECCAVCPQPPTAPTRPPNGQGPQGPKGDPGPPGIPGRNGDPGIPGQPGSPGSPGPPGICESCPTGPQNYSPQYDSYDVKSGVAVGGLAGYPGPAGPPGPPGPPGTSGHPGSPGSPGYQGPPGEPGQAGPSGPPGPPGAIGPSGPAGKDGESGRPGRPGERGLPGPPGIKGPAGIPGFPGMKGHRGFDGRNGEKGETGAPGLKGENGLPGENGAPGPMGPRGAPGERGRPGLPGAAGARGNDGARGSDGQPGPPGPPGTAGFPGSPGAKGEVGPAGSPGSNGAPGQRGEPGPQGHAGAQGPPGPPGINGSPGGKGEMGPAGIPGAPGLMGARGPPGPAGANGAPGLRGGAGEPGKNGAKGEPGPRGERGEAGIPGVPGAKGEDGKDGSPGEPGANGLPGAAGERGAPGFRGPAGPNGIPGEKGPAGERGAPGPAGPRGAAGEPGRDGVPGGPGMRGMPGSPGGPGSDGKPGPPGSQGESGRPGPPGPSGPRGQPGVMGFPGPKGNDGAPGKNGERGGPGGPGPQGPPGKNGETGPQGPPGPTGPGGDKGDTGPPGPQGLQGLPGTGGPPGENGKPGEPGPKGDAGAPGAPGGKGDAGAPGERGPPGLAGAPGLRGGAGPPGPEGGKGAAGPPGPPGAAGTPGLQGMPGERGGLGSPGPKGDKGEPGGPGADGVPGKDGPRGPTGPIGPPGPAGQPGDKGEGGAPGLPGIAGPRGSPGERGETGPPGPAGFPGAPGQNGEPGGKGERGAPGEKGEGGPPGVAGPPGGSGPAGPPGPQGVKGERGSPGGPGAAGFPGARGLPGPPGSNGNPGPPGPSGSPGKDGPPGPAGNTGAPGSPGVSGPKGDAGQPGEKGSPGAQGPPGAPGPLGIAGITGARGLAGPPGMPGPRGSPGPQGVKGESGKPGANGLSGERGPPGPQGLPGLAGTAGEPGRDGNPGSDGLPGRDGSPGGKGDRGENGSPGAPGAPGHPGPPGPVGPAGKSGDRGESGPAGPAGAPGPAGSRGAPGPQGPRGDKGETGERGAAGIKGHRGFPGNPGAPGSPGPAGQQGAIGSPGPAGPRGPVGPSGPPGKDGTSGHPGPIGPPGPRGNRGERGSEGSPGHPGQPGPPGPPGAPGPCCGGVGAAAIAGIGGEKAGGFAPYYGDEPMDFKINTDEIMTSLKSVNGQIESLISPDGSRKNPARNCRDLKFCHPELKSGEYWVDPNQGCKLDAIKVFCNMETGETCISANPLNVPRKHWWTDSSAEKKHVWFGESMDGGFQFSYGNPELPEDVLDVQLAFLRLLSSRASQNITYHCKNSIAYMDQASGNVKKALKLMGSNEGEFKAEGNSKFTYTVLEDGCTKHTGEWSKTVFEYRTRKAVRLPIVDIAPYDIGGPDQEFGVDVGPVCFL

SEQ ID NO: 66 - protein, 1669 aa, Homo sapiens
MGPRLSVWLLLLPAALLLHEEHSRAAAKGGCAGSGCGKCDCHGVKGQKGERGLPGLQGVIGFPGMQGPEGPQGPPGQKGDTGEPGLPGTKGTRGPPGASGYPGNPGLPGIPGQDGPPGPPGIPGCNGTKGERGPLGPPGLPGFAGNPGPPGLPGMKGDPGEILGHVPGMLLKGERGFPGIPGTPGPPGLPGLQGPVGPPGFTGPPGPPGPPGPPGEKGQMGLSFQGPKGDKGDQGVSGPPGVPGQAQVQEKGDFATKGEKGQKGEPGFQGMPGVGEKGEPGKPGPRGKPGKDGDKGEKGSPGFPGEPGYPGLIGRQGPQGEKGEAGPPGPPGIVIGTGPLGEKGERGYPGTPGPRGEPGPKGFPGLPGQPGPPGLPVPGQAGAPGFPGERGEKGDRGFPGTSLPGPSGRDGLPGPPGSPGPPGQPGYTNGIVECQPGPPGDQGPPGIPGQPGFIGEIGEKGQKGESCLICDIDGYRGPPGPQGPPGEIGFPGQPGAKGDRGLPGRDGVAGVPGPQGTPGLIGQPGAKGEPGEFYFDLRLKGDKGDPGFPGQPGMTGRAGSPGRDGHPGLPGPKGSPGSVGLKGERGPPGGVGFPGSRGDTGPPGPPGYGPAGPIGDKGQAGFPGGPGSPGLPGPKGEPGKIVPLPGPPGAEGLPGSPGFPGPQGDRGFPGTPGRPGLPGEKGAVGQPGIGFPGPPGPKGVDGLPGDMGPPGTPGRPGFNGLPGNPGVQGQKGEPGVGLPGLKGLPGLPGIPGTPGEKGSIGVPGVPGEHGAIGPPGLQGIRGEPGPPGLPGSVGSPGVPGIGPPGARGPPGGQGPPGLSGPPGIKGEKGFPGFPGLDMPGPKGDKGAQGLPGITGQSGLPGLPGQQGAPGIPGFPGSKGEMGVMGTPGQPGSPGPVGAPGLPGEKGDHGFPGSSGPRGDPGLKGDKGDVGLPGKPGSMDKVDMGSMKGQKGDQGEKGQIGPIGEKGSRGDPGTPGVPGKDGQAGQPGQPGPKGDPGISGTPGAPGLPGPKGSVGGMGLPGTPGEKGVPGIPGPQGSPGLPGDKGAKGEKGQAGPPGIGIPGLRGEKGDQGIAGFPGSPGEKGEKGSIGIPGMPGSPGLKGSPGSVGYPGSPGLPGEKGDKGLPGLDGIPGVKGEAGLPGTPGPTGPAGQKGEPGSDGIPGSAGEKGEPGLPGRGFPGFPGAKGDKGSKGEVGFPGLAGSPGIPGSKGEQGFMGPPGPQGQPGLPGSPGHATEGPKGDRGPQGQPGLPGLPGPMGPPGLPGIDGVKGDKGNPGWPGAPGVPGPKGDPGFQGMPGIGGSPGITGSKGDMGPPGVPGFQGPKGLPGLQGIKGDQGDQGVPGAKGLPGPPGPPGPYDIIKGEPGLPGPEGPPGLKGLQGLPGPKGQQGVTGLVGIPGPPGIPGFDGAPGQKGEMGPAGPTGPRGFPGPPGPDGLPGSMGPPGTPSVDHGFLVTRHSQTIDDPQCPSGTKILYHGYSLLYVQGNERAHGQDLGTAGSCLRKFSTMPFLFCNINNVCNFASRNDYSYWLSTPEPMPMSMAPITGENIRPFISRCAVCEAPAMVMAVHSQTIQIPPCPSGWSSLWIGYSFVMHTSAGAEGSGQALASPGSCLEEFRSAPFIECHGRGTCNYYANAYSFWLATIERSEMFKKPTPSTLKAGELRTHVSRCQVCMRRT

SEQ ID NO: 67 - protein, 1712 aa, Homo sapiens
MGRDQRAVAGPALRRWLLLGTVTVGFLAQSVLAGVKKFDVPCGGRDCSGGCQCYPEKGGRGQPGPVGPQGYNGPPGLQGFPGLQGRKGDKGERGAPGVTGPKGDVGARGVSGFPGADGIPGHPGQGGPRGRPGYDGCNGTQGDSGPQGPPGSEGFTGPPGPQGPKGQKGEPYALPKEERDRYRGEPGEPGLVGFQGPPGRPGHVGQMGPVGAPGRPGPPGPPGPKGQQGNRGLGFYGVKGEKGDVGQPGPNGIPSDTLHPIIAPTGVTFHPDQYKGEKGSEGEPGIRGISLKGEEGIMGFPGLRGYPGLSGEKGSPGQKGSRGLDGYQGPDGPRGPKGEAGDPGPPGLPAYSPHPSLAKGARGDPGFPGAQGEPGSQGEPGDPGLPGPPGLSIGDGDQRRGLPGEMGPKGFIGDPGIPALYGGPPGPDGKRGPPGPPGLPGPPGPDGFLFGLKGAKGRAGFPGLPGSPGARGPKGWKGDAGECRCTEGDEAIKGLPGLPGPKGFAGINGEPGRKGDRGDPGQHGLPGFPGLKGVPGNIGAPGPKGAKGDSRTITTKGERGQPGVPGVPGMKGDDGSPGRDGLDGFPGLPGPPGDGIKGPPGDPGYPGIPGTKGTPGEMGPPGLGLPGLKGQRGFPGDAGLPGPPGFLGPPGPAGTPGQIDCDTDVKRAVGGDRQEAIQPGCIGGPKGLPGLPGPPGPTGAKGLRGIPGFAGADGGPGPRGLPGDAGREGFPGPPGFIGPRGSKGAVGLPGPDGSPGPIGLPGPDGPPGERGLPGEVLGAQPGPRGDAGVPGQPGLKGLPGDRGPPGFRGSQGMPGMPGLKGQPGLPGPSGQPGLYGPPGLHGFPGAPGQEGPLGLPGIPGREGLPGDRGDPGDTGAPGPVGMKGLSGDRGDAGFTGEQGHPGSPGFKGIDGMPGTPGLKGDRGSPGMDGFQGMPGLKGRPGFPGSKGEAGFFGIPGLKGLAGEPGFKGSRGDPGPPGPPPVILPGMKDIKGEKGDEGPMGLKGYLGAKGIQGMPGIPGLSGIPGLPGRPGHIKGVKGDIGVPGIPGLPGFPGVAGPPGITGFPGFIGSRGDKGAPGRAGLYGEIGATGDFGDIGDTINLPGRPGLKGERGTTGIPGLKGFFGEKGTEGDIGFPGITGVTGVQGPPGLKGQTGFPGLTGPPGSQGELGRIGLPGGKGDDGWPGAPGLPGFPGLRGIRGLHGLPGTKGFPGSPGSDIHGDPGFPGPPGERGDPGEANTLPGPVGVPGQKGDQGAPGERGPPGSPGLQGFPGITPPSNISGAPGDKGAPGIFGLKGYRGPPGPPGSAALPGSKGDTGNPGAPGTPGTKGWAGDSGPQGRPGVFGLPGEKGPRGEQGFMGNTGPTGAVGDRGPKGPKGDPGFPGAPGTVGAPGIAGIPQKIAVQPGTVGPQGRRGPPGAPGEMGPQGPPGEPGFRGAPGKAGPQGRGGVSAVPGFRGDEGPIGHQGPIGQEGAPGRPGSPGLPGMPGRSVSIGYLLVKHSQTDQEPMCPVGMNKLWSGYSLLYFEGQEKAHNQDLGLAGSCLARFSTMPFLYCNPGDVCYYASRNDKSYWLSTTAPLPMMPVAEDEIKPYISRCSVCEAPAIAIAVHSQDVSIPHCPAGWRSLWIGYSFLMHTAAGDEGGGQSLVSPGSCLEDFRATPFIECNGGRGTCHYYANKYSFWLTTIPEQSFQGSPSADTLKAGLIRTHISRCQVCMKNL

SEQ ID NO: 68 - protein, 1670 aa, Homo sapiens
MSARTAPRPQVLLLPLLLVLLAAAPAASKGCVCKDKGQCFCDGAKGEKGEKGFPGPPGSPGQKGFTGPEGLPGPQGPKGFPGLPGLTGSKGVRGISGLPGFSGSPGLPGTPGNTGPYGLVGVPGCSGSKGEQGFPGLPGTLGYPGIPGAAGLKGQKGAPAKEEDIELDAKGDPGLPGAPGPQGLPGPPGFPGPVGPPGPPGFFGFPGAMGPRGPKGHMGERVIGHKGERGVKGLTGPPGPPGTVIVTLTGPDNRTDLKGEKGDKGAMGEPGPPGPSGLPGESYGSEKGAPGDPGLQGKPGKDGVPGFPGSEGVKGNRGFPGLMGEDGIKGQKGDIGPPGFRGPTEYYDTYQEKGDEGTPGPPGPRGARGPQGPSGPPGVPGSPGSSRPGLRGAPGWPGLKGSKGERGRPGKDAMGTPGSPGCAGSPGLPGSPGPPGPPGDIVFRKGPPGDHGLPGYLGSPGIPGVDGPKGEPGLLCTQCPYIPGPPGLPGLPGLHGVKGIPGRQGAAGLKGSPGSPGNTGLPGFPGFPGAQGDPGLKGEKGETLQPEGQVGVPGDPGLRGQPGRKGLDGIPGTPGVKGLPGPKGELALSGEKGDQGPPGDPGSPGSPGPAGPAGPPGYGPQGEPGLQGTQGVPGAPGPPGEAGPRGELSVSTPVPGPPGPPGPPGHPGPQGPPGIPGSLGKCGDPGLPGPDGEPGIPGIGFPGPPGPKGDQGFPGTKGSLGCPGKMGEPGLPGKPGLPGAKGEPAVAMPGGPGTPGFPGERGNSGEHGEIGLPGLPGLPGTPGNEGLDGPRGDPGQPGPPGEQGPPGRCIEGPRGAQGLPGLNGLKGQQGRRGKTGPKGDPGIPGLDRSGFPGETGSPGIPGHQGEMGPLGQRGYPGNPGILGPPGEDGVIGMMGFPGAIGPPGPPGNPGTPGQRGSPGIPGVKGQRGTPGAKGEQGDKGNPGPSEISHVIGDKGEPGLKGFAGNPGEKGNRGVPGMPGLKGLKGLPGPAGPPGPRGDLGSTGNPGEPGLRGIPGSMGNMGMPGSKGKRGTLGFPGRAGRPGLPGIHGLQGDKGEPGYSEGTRPGPPGPTGDPGLPGDMGKKGEMGQPGPPGHLGPAGPEGAPGSPGSPGLPGKPGPHGDLGFKGIKGLLGPPGIRGPPGLPGFPGSPGPMGIRGDQGRDGIPGPAGEKGETGLLRAPPGPRGNPGAQGAKGDRGAPGFPGLPGRKGAMGDAGPRGPTGIEGFPGPPGLPGAIIPGQTGNRGPPGSRGSPGAPGPPGPPGSHVIGIKGDKGSMGHPGPKGPPGTAGDMGPPGRLGAPGTPGLPGPRGDPGFQGFPGVKGEKGNPGFLGSIGPPGPIGPKGPPGVRGDPGTLKIISLPGSPGPPGTPGEPGMQGEPGPPGPPGNLGPCGPRGKPGKDGKPGTPGPAGEKGNKGSKGEPGPAGSDGLPGLKGKRGDSGSPATWTTRGFVFTRHSQTTAIPSCPEGTVPLYSGFSFLFVQGNQRAHGQDLGTLGSCLQRFTTMPFLFCNVNDVCNFASRNDYSYWLSTPALMPMNMAPITGRALEPYISRCTVCEGPAIAIAVHSQTTDIPPCPHGWISLWKGFSFIMFTSAGSEGTGQALASPGSCLEEFRASPFLECHGRGTCNYYSNSYSFWLASLNPERMFRKPIPSTVKAGELEKIISRCQVCMKKRH

SEQ ID NO: 69 - protein, 1690 aa, Homo sapiens
MWSLHIVLMRCSFRLTKSLATGPWSLILILFSVQYVYGSGKKYIGPCGGRDCSVCHCVPEKGSRGPPGPPGPQGPIGPLGAPGPIGLSGEKGMRGDRGPPGAAGDKGDKGPTGVPGFPGLDGIPGHPGPPGPRGKPGMSGHNGSRGDPGFPGGRGALGPGGPLGHPGEKGEKGNSVFILGAVKGIQGDRGDPGLPGLPGSWGAGGPAGPTGYPGEPGLVGPPGQPGRPGLKGNPGVGVKGQMGDPGEVGQQGSPGPTLLVEPPDFCLYKGEKGIKGIPGMVGLPGPPGRKGESGIGAKGEKGIPGFPGPRGDPGSYGSPGFPGLKGELGLVGDPGLFGLIGPKGDPGNRGHPGPPGVLVTPPLPLKGPPGDPGFPGRYGETGDVGPPGPPGLLGRPGEACAGMIGPPGPQGFPGLPGLPGEAGIPGRPDSAPGKPGKPGSPGLPGAPGLQGLPGSSVIYCSVGNPGPQGIKGKVGPPGGRGPKGEKGNEGLCACEPGPMGPPGPPGLPGRQGSKGDLGLPGWLGTKGDPGPPGAEGPPGLPGKHGASGPPGNKGAKGDMVVSRVKGHKGERGPDGPPGFPGQPGSHGRDGHAGEKGDPGPPGDHEDATPGGKGFPGPLGPPGKAGPVGPPGLGFPGPPGERGHPGVPGHPGVRGPDGLKGQKGDTISCNVTYPGRHGPPGFDGPPGPKGFPGPQGAPGLSGSDGHKGRPGTPGTAEIPGPPGFRGDMGDPGFGGEKGSSPVGPPGPPGSPGVNGQKGIPGDPAFGHLGPPGKRGLSGVPGIKGPRGDPGCPGAEGPAGIPGFLGLKGPKGREGHAGFPGVPGPPGHSCERGAPGIPGQPGLPGYPGSPGAPGGKGQPGDVGPPGPAGMKGLPGLPGRPGAHGPPGLPGIPGPFGDDGLPGPPGPKGPRGLPGFPGFPGERGKPGAEGCPGAKGEPGEKGMSGLPGDRGLRGAKGAIGPPGDEGEMAIISQKGTPGEPGPPGDDGFPGERGDKGTPGMQGRRGEPGRYGPPGFHRGEPGEKGQPGPPGPPGPPGSTGLRGFIGFPGLPGDQGEPGSPGPPGFSGIDGARGPKGNKGDPASHFGPPGPKGEPGSPGCPGHFGASGEQGLPGIQGPRGSPGRPGPPGSSGPPGCPGDHGMPGLRGQPGEMGDPGPRGLQGDPGIPGPPGIKGPSGSPGLNGLHGLKGQKGTKGASGLHDVGPPGPVGIPGLKGERGDPGSPGISPPGPRGKKGPPGPPGSSGPPGPAGATGRAPKDIPDPGPPGDQGPPGPDGPRGAPGPPGLPGSVDLLRGEPGDCGLPGPPGPPGPPGPPGYKGFPGCDGKDGQKGPVGFPGPQGPHGFPGPPGEKGLPGPPGRKGPTGLPGPRGEPGPPADVDDCPRIPGLPGAPGMRGPEGAMGLPGMRGPSGPGCKGEPGLDGRRGVDGVPGSPGPPGRKGDTGEDGYPGGPGPPGPIGDPGPKGFGPGYLGGFLLVLHSQTDQEPTCPLGMPRLWTGYSLLYLEGQEKAHNQDLGLAGSCLPVFSTLPFAYCNIHQVCHYAQRNDRSYWLASAAPLPMMPLSEEAIRPYVSRCAVCEAPAQAVAVHSQDQSIPPCPQTWRSLWIGYSFLMHTGAGDQGGGQALMSPGSCLEDFRAAPFLECQGRQGTCHFFANKYSFWLTTVKADLQFSSAPAPDTLKESQAQRQKISRCQVCVKYS

SEQ ID NO: 70 - protein, 1685 aa, Homo sapiens
MKLRGVSLAAGLFLLALSLWGQPAEAAACYGCSPGSKCDCSGIKGEKGERGFPGLEGHPGLPGFPGPEGPPGPRGQKGDDGIPGPPGPKGIRGPPGLPGFPGTPGLPGMPGHDGAPGPQGIPGCNGTKGERGFPGSPGFPGLQGPPGPPGIPGMKGEPGSIIMSSLPGPKGNPGYPGPPGIQGLPGPTGIPGPIGPPGPPGLMGPPGPPGLPGPKGNMGLNFQGPKGEKGEQGLQGPPGPPGQISEQKRPIDVEFQKGDQGLPGDRGPPGPPGIRGPPGPPGGEKGEKGEQGEPGKRGKPGKDGENGQPGIPGLPGDPGYPGEPGRDGEKGQKGDTGPPGPPGLVIPRPGTGITIGEKGNIGLPGLPGEKGERGFPGIQGPPGLPGPPGAAVMGPPGPPGFPGERGQKGDEGPPGISIPGPPGLDGQPGAPGLPGPPGPAGPHIPPSDEICEPGPPGPPGSPGDKGLQGEQGVKGDKGDTCFNCIGTGISGPPGQPGLPGLPGPPGSLGFPGQKGEKGQAGATGPKGLPGIPGAPGAPGFPGSKGEPGDILTFPGMKGDKGELGSPGAPGLPGLPGTPGQDGLPGLPGPKGEPGGITFKGERGPPGNPGLPGLPGNIGPMGPPGFGPPGPVGEKGIQGVAGNPGQPGIPGPKGDPGQTITQPGKPGLPGNPGRDGDVGLPGDPGLPGQPGLPGIPGSKGEPGIPGIGLPGPPGPKGFPGIPGPPGAPGTPGRIGLEGPPGPPGFPGPKGEPGFALPGPPGPPGLPGFKGALGPKGDRGFPGPPGPPGRTGLDGLPGPKGDVGPNGQPGPMGPPGLPGIGVQGPPGPPGIPGPIGQPGLHGIPGEKGDPGPPGLDVPGPPGERGSPGIPGAPGPIGPPGSPGLPGKAGASGFPGTKGEMGMMGPPGPPGPLGIPGRSGVPGLKGDDGLQGQPGLPGPTGEKGSKGEPGLPGPPGPMDPNLLGSKGEKGEPGLPGIPGVSGPKGYQGLPGDPGQPGLSGQPGLPGPPGPKGNPGLPGQPGLIGPPGLKGTIGDMGFPGPQGVEGPPGPSGVPGQPGSPGLPGQKGDKGDPGISSIGLPGLPGPKGEPGLPGYPGNPGIKGSVGDPGLPGLPGTPGAKGQPGLPGFPGTPGPPGPKGISGPPGNPGLPGEPGPVGGGGHPGQPGPPGEKGKPGQDGIPGPAGQKGEPGQPGFGNPGPPGLPGLSGQKGDGGLPGIPGNPGLPGPKGEPGFHGFPGVQGPPGPPGSPGPALEGPKGNPGPQGPPGRPGLPGPEGPPGLPGNGGIKGEKGNPGQPGLPGLPGLKGDQGPPGLQGNPGRPGLNGMKGDPGLPGVPGFPGMKGPSGVPGSAGPEGEPGLIGPPGPPGLPGPSGQSIIIKGDAGPPGIPGQPGLKGLPGPQGPQGLPGPTGPPGDPGRNGLPGFDGAGGRKGDPGLPGQPGTRGLDGPPGPDGLQGPPGPPGTSSVAHGFLITRHSQTTDAPQCPQGTLQVYEGFSLLYVQGNKRAHGQDLGTAGSCLRRFSTMPFMFCNINNVCNFASRNDYSYWLSTPEPMPMSMQPLKGQSIQPFISRCAVCEAPAVVIAVHSQTIQIPHCPQGWDSLWIGYSFMMHTSAGAEGSGQALASPGSCLEEFRSAPFIECHGRGTCNYYANSYSFWLATVDVSDMFSKPQSETLKAGDLRTRISRCQVCMKRT

SEQ ID NO: 71 - protein, 1691 aa, Homo sapiens
MLINKLWLLLVTLCLTEELAAAGEKSYGKPCGGQDCSGSCQCFPEKGARGRPGPIGIQGPTGPQGFTGSTGLSGLKGERGFPGLLGPYGPKGDKGPMGVPGFLGINGIPGHPGQPGPRGPPGLDGCNGTQGAVGFPGPDGYPGLLGPPGLPGQKGSKGDPVLAPGSFKGMKGDPGLPGLDGITGPQGAPGFPGAVGPAGPPGLQGPPGPPGPLGPDGNMGLGFQGEKGVKGDVGLPGPAGPPPSTGELEFMGFPKGKKGSKGEPGPKGFPGISGPPGFPGLGTTGEKGEKGEKGIPGLPGPRGPMGSEGVQGPPGQQGKKGTLGFPGLNGFQGIEGQKGDIGLPGPDVFIDIDGAVISGNPGDPGVPGLPGLKGDEGIQGLRGPSGVPGLPALSGVPGALGPQGFPGLKGDQGNPGRTTIGAAGLPGRDGLPGPPGPPGPPSPEFETETLHNKESGFPGLRGEQGPKGNLGLKGIKGDSGFCACDGGVPNTGPPGEPGPPGPWGLIGLPGLKGARGDRGSGGAQGPAGAPGLVGPLGPSGPKGKKGEPILSTIQGMPGDRGDSGSQGFRGVIGEPGKDGVPGLPGLPGLPGDGGQGFPGEKGLPGLPGEKGHPGPPGLPGNGLPGLPGPRGLPGDKGKDGLPGQQGLPGSKGITLPCIIPGSYGPSGFPGTPGFPGPKGSRGLPGTPGQPGSSGSKGEPGSPGLVHLPELPGFPGPRGEKGLPGFPGLPGKDGLPGMIGSPGLPGSKGATGDIFGAENGAPGEQGLQGLTGHKGFLGDSGLPGLKGVHGKPGLLGPKGERGSPGTPGQVGQPGTPGSSGPYGIKGKSGLPGAPGFPGISGHPGKKGTRGKKGPPGSIVKKGLPGLKGLPGNPGLVGLKGSPGSPGVAGLPALSGPKGEKGSVGFVGFPGIPGLPGIPGTRGLKGIPGSTGKMGPSGRAGTPGEKGDRGNPGPVGIPSPRRPMSNLWLKGDKGSQGSAGSNGFPGPRGDKGEAGRPGPPGLPGAPGLPGIIKGVSGKPGPPGFMGIRGLPGLKGSSGITGFPGMPGESGSQGIRGSPGLPGASGLPGLKGDNGQTVEISGSPGPKGQPGESGFKGTKGRDGLIGNIGFPGNKGEDGKVGVSGDVGLPGAPGFPGVAGMRGEPGLPGSSGHQGAIGPLGSPGLIGPKGFPGFPGLHGLNGLPGTKGTHGTPGPSITGVPGPAGLPGPKGEKGYPGIGIGAPGKPGLRGQKGDRGFPGLQGPAGLPGAPGISLPSLIAGQPGDPGRPGLDGERGRPGPAGPPGPPGPSSNQGDTGDPGFPGIPGPKGPKGDQGIPGFSGLPGELGLKGMRGEPGFMGTPGKVGPPGDPGFPGMKGKAGPRGSSGLQGDPGQTPTAEAVQVPPGPLGLPGIDGIPGLTGDPGAQGPVGLQGSKGLPGIPGKDGPSGLPGPPGALGDPGLPGLQGPPGFEGAPGQQGPFGMPGMPGQSMRVGYTLVKHSQSEQVPPCPIGMSQLWVGYSLLFVEGQEKAHNQDLGFAGSCLPRFSTMPFIYCNINEVCHYARRNDKSYWLSTTAPIPMMPVSQTQIPQYISRCSVCEAPSQAIAVHSQDITIPQCPLGWRSLWIGYSFLMHTAAGAEGGGQSLVSPGSCLEDFRATPFIECSGARGTCHYFANKYSFWLTTVEERQQFGELPVSETLKAGQLHTRVSRCQVCMKSL

SEQ ID NO: 72 - protein, 1838 aa, Homo sapiens
MDVHTRWKARSALRPGAPLLPPLLLLLLWAPPPSRAAQPADLLKVLDFHNLPDGITKTTGFCATRRSSKGPDVAYRVTKDAQLSAPTKQLYPASAFPEDFSILTTVKAKKGSQAFLVSIYNEQGIQQIGLELGRSPVFLYEDHTGKPGPEDYPLFRGINLSDGKWHRIALSVHKKNVTLILDCKKKTTKFLDRSDHPMIDINGIIVFGTRILDEEVFEGDIQQLLFVSDHRAAYDYCEHYSPDCDTAVPDTPQSQDPNPDEYYTEGDGEGETYYYEYPYYEDPEDLGKEPTPSKKPVEAAKETTEVPEELTPTPTEAAPMPETSEGAGKEEDVGIGDYDYVPSEDYYTPSPYDDLTYGEGEENPDQPTDPGAGAEIPTSTADTSNSSNPAPPPGEGADDLEGEFTEETIRNLDENYYDPYYDPTSSPSEIGPGMPANQDTIYEGIGGPRGEKGQKGEPAIIEPGMLIEGPPGPEGPAGLPGPPGTMGPTGQVGDPGERGPPGRPGLPGADGLPGPPGTMLMLPFRFGGGGDAGSKGPMVSAQESQAQAILQQARLALRGPAGPMGLTGRPGPVGPPGSGGLKGEPGDVGPQGPRGVQGPPGPAGKPGRRGRAGSDGARGMPGQTGPKGDRGFDGLAGLPGEKGHRGDPGPSGPPGPPGDDGERGDDGEVGPRGLPGEPGPRGLLGPKGPPGPPGPPGVTGMDGQPGPKGNVGPQGEPGPPGQQGNPGAQGLPGPQGAIGPPGEKGPLGKPGLPGMPGADGPPGHPGKEGPPGEKGGQGPPGPQGPIGYPGPRGVKGADGIRGLKGTKGEKGEDGFPGFKGDMGIKGDRGEIGPPGPRGEDGPEGPKGRGGPNGDPGPLGPPGEKGKLGVPGLPGYPGRQGPKGSIGFPGFPGANGEKGGRGTPGKPGPRGQRGPTGPRGERGPRGITGKPGPKGNSGGDGPAGPPGERGPNGPQGPTGFPGPKGPPGPPGKDGLPGHPGQRGETGFQGKTGPPGPPGVVGPQGPTGETGPMGERGHPGPPGPPGEQGLPGLAGKEGTKGDPGPAGLPGKDGPPGLRGFPGDRGLPGPVGALGLKGNEGPPGPPGPAGSPGERGPAGAAGPIGIPGRPGPQGPPGPAGEKGAPGEKGPQGPAGRDGLQGPVGLPGPAGPVGPPGEDGDKGEIGEPGQKGSKGDKGEQGPPGPTGPQGPIGQPGPSGADGEPGPRGQQGLFGQKGDEGPRGFPGPPGPVGLQGLPGPPGEKGETGDVGQMGPPGPPGPRGPSGAPGADGPQGPPGGIGNPGAVGEKGEPGEAGEPGLPGEGGPPGPKGERGEKGESGPSGAAGPPGPKGPPGDDGPKGSPGPVGFPGDPGPPGEPGPAGQDGPPGDKGDDGEPGQTGSPGPTGEPGPSGPPGKRGPPGPAGPEGRQGEKGAKGEAGLEGPPGKTGPIGPQGAPGKPGPDGLRGIPGPVGEQGLPGSPGPDGPPGPMGPPGLPGLKGDSGPKGEKGHPGLIGLIGPPGEQGEKGDRGLPGPQGSSGPKGEQGITGPSGPIGPPGPPGLPGPPGPKGAKGSSGPTGPKGEAGHPGPPGPPGPPGEVIQPLPIQASRTRRNIDASQLLDDGNGENYVDYADGMEEIFGSLNSLKLEIEQMKRPLGTQQNPARTCKDLQLCHPDFPDGEYWVDPNQGCSRDSFKVYCNFTAGGSTCVFPDKKSEGARITSWPKENPGSWFSEFKRGKLLSYVDAEGNPVGVVQMTFLRLLSASAHQNVTYHCYQSVAWQDAATGSYDKALRFLGSNDEEMSYDNNPYIRALVDGCATKKGYQKTVLEIDTPKVEQVPIVDIMFNDFGEASQKFGFEVGPACFMG

SEQ ID NO: 73 - protein, 1499 aa, Homo sapiens
MMANWAEARPLLILIVLLGQFVSIKAQEEDEDEGYGEEIACTQNGQMYLNRDIWKPAPCQICVCDNGAILCDKIECQDVLDCADPVTPPGECCPVCSQTPGGGNTNFGRGRKGQKGEPGLVPVVTGIRGRPGPAGPPGSQGPRGERGPKGRPGPRGPQGIDGEPGVPGQPGAPGPPGHPSHPGPDGLSRPFSAQMAGLDEKSGLGSQVGLMPGSVGPVGPRGPQGLQGQQGGAGPTGPPGEPGDPGPMGPIGSRGPEGPPGKPGEDGEPGRNGNPGEVGFAGSPGARGFPGAPGLPGLKGHRGHKGLEGPKGEVGAPGSKGEAGPTGPMGAMGPLGPRGMPGERGRLGPQGAPGQRGAHGMPGKPGPMGPLGIPGSSGFPGNPGMKGEAGPTGARGPEGPQGQRGETGPPGPVGSPGLPGAIGTDGTPGAKGPTGSPGTSGPPGSAGPPGSPGPQGSTGPQGIRGQPGDPGVPGFKGEAGPKGEPGPHGIQGPIGPPGEEGKRGPRGDPGTVGPPGPVGERGAPGNRGFPGSDGLPGPKGAQGERGPVGSSGPKGSQGDPGRPGEPGLPGARGLTGNPGVQGPEGKLGPLGAPGEDGRPGPPGSIGIRGQPGSMGLPGPKGSSGDPGKPGEAGNAGVPGQRGAPGKDGEVGPSGPVGPPGLAGERGEQGPPGPTGFQGLPGPPGPPGEGGKPGDQGVPGDPGAVGPLGPRGERGNPGERGEPGITGLPGEKGMAGGHGPDGPKGSPGPSGTPGDTGPPGLQGMPGERGIAGTPGPKGDRGGIGEKGAEGTAGNDGARGLPGPLGPPGPAGPTGEKGEPGPRGLVGPPGSRGNPGSRGENGPTGAVGFAGPQGPDGQPGVKGEPGEPGQKGDAGSPGPQGLAGSPGPHGPNGVPGLKGGRGTQGPPGATGFPGSAGRVGPPGPAGAPGPAGPLGEPGKEGPPGLRGDPGSHGRVGDRGPAGPPGGPGDKGDPGEDGQPGPDGPPGPAGTTGQRGIVGMPGQRGERGMPGLPGPAGTPGKVGPTGATGDKGPPGPVGPPGSNGPVGEPGPEGPAGNDGTPGRDGAVGERGDRGDPGPAGLPGSQGAPGTPGPVGAPGDAGQRGDPGSRGPIGPPGRAGKRGLPGPQGPRGDKGDHGDRGDRGQKGHRGFTGLQGLPGPPGPNGEQGSAGIPGPFGPRGPPGPVGPSGKEGNPGPLGPIGPPGVRGSVGEAGPEGPPGEPGPPGPPGPPGHLTAALGDIMGHYDESMPDPLPEFTEDQAAPDDKNKTDPGVHATLKSLSSQIETMRSPDGSKKHPARTCDDLKLCHSAKQSGEYWIDPNQGSVEDAIKVYCNMETGETCISANPSSVPRKTWWASKSPDNKPVWYGLDMNRGSQFAYGDHQSPNTAITQMTFLRLLSKEASQNITYICKNSVGYMDDQAKNLKKAVVLKGANDLDIKAEGNIRFRYIVLQDTCSKRNGNVGKTVFEYRTQNVARLPIIDLAPVDVGGTDQEFGVEIGPVCFV

SEQ ID NO: 74 - protein, 1745 aa, Homo sapiens
MGNRRDLGQPRAGLCLLLAALQLLPGTQADPVDVLKALGVQGGQAGVPEGPGFCPQRTPEGDRAFRIGQASTLGIPTWELFPEGHFPENFSLLITLRGQPANQSVLLSIYDERGARQLGLALGPALGLLGDPFRPLPQQVNLTDGRWHRVAVSIDGEMVTLVADCEAQPPVLGHGPRFISIAGLTVLGTQDLGEKTFEGDIQELLISPDPQAAFQACERYLPDCDNLAPAATVAPQGEPETPRPRRKGKGKGRKKGRGRKGKGRKKNKEIWTSSPPPDSAENQTSTDIPKTETPAPNLPPTPTPLVVTSTVTTGLNATILERSLDPDSGTELGTLETKAAREDEEGDDSTMGPDFRAAEYPSRTQFQIFPGAGEKGAKGEPAVIEKGQQFEGPPGAPGPQGVVGPSGPPGPPGFPGDPGPPGPAGLPGIPGIDGIRGPPGTVIMMPFQFAGGSFKGPPVSFQQAQAQAVLQQTQLSMKGPPGPVGLTGRPGPVGLPGHPGLKGEEGAEGPQGPRGLQGPHGPPGRVGKMGRPGADGARGLPGDTGPKGDRGFDGLPGLPGEKGQRGDFGHVGQPGPPGEDGERGAEGPPGPTGQAGEPGPRGLLGPRGSPGPTGRPGVTGIDGAPGAKGNVGPPGEPGPPGQQGNHGSQGLPGPQGLIGTPGEKGPPGNPGIPGLPGSDGPLGHPGHEGPTGEKGAQGPPGSAGPPGYPGPRGVKGTSGNRGLQGEKGEKGEDGFPGFKGDVGLKGDQGKPGAPGPRGEDGPEGPKGQAGQAGEEGPPGSAGEKGKLGVPGLPGYPGRPGPKGSIGFPGPLGPIGEKGKSGKTGQPGLEGERGPPGSRGERGQPGATGQPGPKGDVGQDGAPGIPGEKGLPGLQGPPGFPGPKGPPGHQGKDGRPGHPGQRGELGFQGQTGPPGPAGVLGPQGKTGEVGPLGERGPPGPPGPPGEQGLPGLEGREGAKGELGPPGPLGKEGPAGLRGFPGPKGGPGDPGPTGLKGDKGPPGPVGANGSPGERGPLGPAGGIGLPGQSGSEGPVGPAGKKGSRGERGPPGPTGKDGIPGPLGPLGPPGAAGPSGEEGDKGDVGAPGHKGSKGDKGDAGPPGQPGIRGPAGHPGPPGADGAQGRRGPPGLFGQKGDDGVRGFVGVIGPPGLQGLPGPPGEKGEVGDVGSMGPHGAPGPRGPQGPTGSEGTPGLPGGVGQPGAVGEKGERGDAGDPGPPGAPGIPGPKGDIGEKGDSGPSGAAGPPGKKGPPGEDGAKGSVGPTGLPGDLGPPGDPGVSGIDGSPGEKGDPGDVGGPGPPGASGEPGAPGPPGKRGPSGHMGREGREGEKGAKGEPGPDGPPGRTGPMGARGPPGRVGPEGLRGIPGPVGEPGLLGAPGQMGPPGPLGPSGLPGLKGDTGPKGEKGHIGLIGLIGPPGEAGEKGDQGLPGVQGPPGPKGDPGPPGPIGSLGHPGPPGVAGPLGQKGSKGSPGSMGPRGDTGPAGPPGPPGAPAELHGLRRRRRFVPVPLPVVEGGLEEVLASLTSLSLELEQLRRPPGTAERPGLVCHELHRNHPHLPDGEYWIDPNQGCARDSFRVFCNFTAGGETCLYPDKKFEIVKLASWSKEKPGGWYSTFRRGKKFSYVDADGSPVNVVQLNFLKLLSATARQNFTYSCQNAAAWLDEATGDYSHSARFLGTNGEELSFNQTTAATVSVPQDGCRLRKGQTKTLFEFSSSRAGFLPLWDVAATDFGQTNQKFGFELGPVCFSS

SEQ ID NO: 75 - protein, 1028 aa, Homo sapiens
MRAARALLPLLLQACWTAAQDEPETPRAVAFQDCPVDLFFVLDTSESVALRLKPYGALVDKVKSFTKRFIDNLRDRYYRCDRNLVWNAGALHYSDEVEIIQGLTRMPGGRDALKSSVDAVKYFGKGTYTDCAIKKGLEQLLVGGSHLKENKYLIVVTDGHPLEGYKEPCGGLEDAVNEAKHLGVKVFSVAITPDHLEPRLSIIATDHTYRRNFTAADWGQSRDAEEAISQTIDTIVDMIKNNVEQVCCSFECQPARGPPGLRGDPGFEGERGKPGLPGEKGEAGDPGRPGDLGPVGYQGMKGEKGSRGEKGSRGPKGYKGEKGKRGIDGVDGVKGEMGYPGLPGCKGSPGFDGIQGPPGPKGDPGAFGLKGEKGEPGADGEAGRPGSSGPSGDEGQPGEPGPPGEKGEAGDEGNPGPDGAPGERGGPGERGPRGTPGTRGPRGDPGEAGPQGDQGREGPVGVPGDPGEAGPIGPKGYRGDEGPPGSEGARGAPGPAGPPGDPGLMGERGEDGPAGNGTEGFPGFPGYPGNRGAPGINGTKGYPGLKGDEGEAGDPGDDNNDIAPRGVKGAKGYRGPEGPQGPPGHQGPPGPDECEILDIIMKMCSCCECKCGPIDLLFVLDSSESIGLQNFEIAKDFVVKVIDRLSRDELVKFEPGQSYAGVVQYSHSQMQEHVSLRSPSIRNVQELKEAIKSLQWMAGGTFTGEALQYTRDQLLPPSPNNRIALVITDGRSDTQRDTTPLNVLCSPGIQVVSVGIKDVFDFIPGSDQLNVISCQGLAPSQGRPGLSLVKENYAELLEDAFLKNVTAQICIDKKCPDYTCPITFSSPADITILLDGSASVGSHNFDTTKRFAKRLAERFLTAGRTDPAHDVRVAVVQYSGTGQQRPERASLQFLQNYTALASAVDAMDFINDATDVNDALGYVTRFYREASSGAAKKRLLLFSDGNSQGATPAAIEKAVQEAQRAGIEIFVVVVGRQVNEPHIRVLVTGKTAEYDVAYGESHLFRVPSYQALLRGVFHQTVSRKVALG

SEQ ID NO: 76 - protein, 1019 aa, Homo sapiens
MLQGTCSVLLLWGILGAIQAQQQEVISPDTTERNNNCPEKTDCPIHVYFVLDTSESVTMQSPTDILLFHMKQFVPQFISQLQNEFYLDQVALSWRYGGLHFSDQVEVFSPPGSDRASFIKNLQGISSFRRGTFTDCALANMTEQIRQDRSKGTVHFAVVITDGHVTGSPCGGIKLQAERAREEGIRLFAVAPNQNLKEQGLRDIASTPHELYRNDYATMLPDSTEIDQDTINRIIKVMKHEAYGECYKVSCLEIPGPSGPKGYRGQKGAKGNMGEPGEPGQKGRQGDPGIEGPIGFPGPKGVPGFKGEKGEFGADGRKGAPGLAGKNGTDGQKGKLGRIGPPGCKGDPGNRGPDGYPGEAGSPGERGDQGGKGDPGRPGRRGPPGEIGAKGSKGYQGNSGAPGSPGVKGAKGGPGPRGPKGEPGRRGDPGTKGSPGSDGPKGEKGDPGPEGPRGLAGEVGNKGAKGDRGLPGPRGPQGALGEPGKQGSRGDPGDAGPRGDSGQPGPKGDPGRPGFSYPGPRGAPGEKGEPGPRGPEGGRGDFGLKGEPGRKGEKGEPADPGPPGEPGPRGPRGVPGPEGEPGPPGDPGLTECDVMTYVRETCGCCDCEKRCGALDVVFVIDSSESIGYTNFTLEKNFVINVVNRLGAIAKDPKSETGTRVGVVQYSHEGTFEAIQLDDERIDSLSSFKEAVKNLEWIAGGTWTPSALKFAYDRLIKESRRQKTRVFAVVITDGRHDPRDDDLNLRALCDRDVTVTAIGIGDMFHEKHESENLYSIACDKPQQVRNMTLFSDLVAEKFIDDMEDVLCPDPQIVCPDLPCQTELSVAQCTQRPVDIVFLLDGSERLGEQNFHKARRFVEQVARRLTLARRDDDPLNARVALLQFGGPGEQQVAFPLSHNLTAIHEALETTQYLNSFSHVGAGVVHAINAIVRSPRGGARRHAELSFVFLTDGVTGNDSLHESAHSMRKQNVVPTVLALGSDVDMDVLTTLSLGDRAAVFHEKDYDSLAQPGFFDRFIRWIC

SEQ ID NO: 77 - protein, 3177 aa, Homo sapiens
MRKHRHLPLVAVFCLFLSGFPTTHAQQQQADVKNGAAADIIFLVDSSWTIGEEHFQLVREFLYDVVKSLAVGENDFHFALVQFNGNPHTEFLLNTYRTKQEVLSHISNMSYIGGTNQTGKGLEYIMQSHLTKAAGSRAGDGVPQVIVVLTDGHSKDGLALPSAELKSADVNVFAIGVEDADEGALKEIASEPLNMHMFNLENFTSLHDIVGNLVSCVHSSVSPERAGDTETLKDITAQDSADIIFLIDGSNNTGSVNFAVILDFLVNLLEKLPIGTQQIRVGVVQFSDEPRTMFSLDTYSTKAQVLGAVKALGFAGGELANIGLALDFVVENHFTRAGGSRVEEGVPQVLVLISAGPSSDEIRYGVVALKQASVFSFGLGAQAASRAELQHIATDDNLVFTVPEFRSFGDLQEKLLPYIVGVAQRHIVLKPPTIVTQVIEVNKRDIVFLVDGSSALGLANFNAIRDFIAKVIQRLEIGQDLIQVAVAQYADTVRPEFYFNTHPTKREVITAVRKMKPLDGSALYTGSALDFVRNNLFTSSAGYRAAEGIPKLLVLITGGKSLDEISQPAQELKRSSIMAFAIGNKGADQAELEEIAFDSSLVFIPAEFRAAPLQGMLPGLLAPLRTLSGTPEVHSNKRDIIFLLDGSANVGKTNFPYVRDFVMNLVNSLDIGNDNIRVGLVQFSDTPVTEFSLNTYQTKSDILGHLRQLQLQGGSGLNTGSALSYVYANHFTEAGGSRIREHVPQLLLLLTAGQSEDSYLQAANALTRAGILTFCVGASQANKAELEQIAFNPSLVYLMDDFSSLPALPQQLIQPLTTYVSGGVEEVPLAQPESKRDILFLFDGSANLVGQFPVVRDFLYKIIDELNVKPEGTRIAVAQYSDDVKVESRFDEHQSKPEILNLVKRMKIKTGKALNLGYALDYAQRYIFVKSAGSRIEDGVLQFLVLLVAGRSSDRVDGPASNLKQSGVVPFIFQAKNADPAELEQIVLSPAFILAAESLPKIGDLHPQIVNLLKSVHNGAPAPVSGEKDVVFLLDGSEGVRSGFPLLKEFVQRVVESLDVGQDRVRVAVVQYSDRTRPEFYLNSYMNKQDVVNAVRQLTLLGGPTPNTGAALEFVLRNILVSSAGSRITEGVPQLLIVLTADRSGDDVRNPSVVVKRGGAVPIGIGIGNADITEMQTISFIPDFAVAIPTFRQLGTVQQVISERVTQLTREELSRLQPVLQPLPSPGVGGKRDVVFLIDGSQSAGPEFQYVRTLIERLVDYLDVGFDTTRVAVIQFSDDPKVEFLLNAHSSKDEVQNAVQRLRPKGGRQINVGNALEYVSRNIFKRPLGSRIEEGVPQFLVLISSGKSDDEVDDPAVELKQFGVAPFTIARNADQEELVKISLSPEYVFSVSTFRELPSLEQKLLTPITTLTSEQIQKLLASTRYPPPAVESDAADIVFLIDSSEGVRPDGFAHIRDFVSRIVRRLNIGPSKVRVGVVQFSNDVFPEFYLKTYRSQAPVLDAIRRLRLRGGSPLNTGKALEFVARNLFVKSAGSRIEDGVPQHLVLVLGGKSQDDVSRFAQVIRSSGIVSLGVGDRNIDRTELQTITNDPRLVFTVREFRELPNIEERIMNSFGPSAATPAPPGVDTPPPSRPEKKKADIVFLLDGSINFRRDSFQEVLRFVSEIVDTVYEDGDSIQVGLVQYNSDPTDEFFLKDFSTKRQIIDAINKVVYKGGRHANTKVGLEHLRVNHFVPEAGSRLDQRVPQIAFVITGGKSVEDAQDVSLALTQRGVKVFAVGVRNIDSEEVGKIASNSATAFRVGNVQELSELSEQVLETLHDAMHETLCPGVTDAAKACNLDVILGFDGSRDQNVFVAQKGFESKVDAILNRISQMHRVSCSGGRSPTVRVSVVANTPSGPVEAFDFDEYQPEMLEKFRNMRSQHPYVLTEDTLKVYLNKFRQSSPDSVKVVIHFTDGADGDLADLHRASENLRQEGVRALILVGLERVVNLERLMHLEFGRGFMYDRPLRLNLLDLDYELAEQLDNIAEKACCGVPCKCSGQRGDRGPIGSIGPKGIPGEDGYRGYPGDEGGPGERGPPGVNGTQGFQGCPGQRGVKGSRGFPGEKGEVGEIGLDGLDGEDGDKGLPGSSGEKGNPGRRGDKGPRGEKGERGDVGIRGDPGNPGQDSQERGPKGETGDLGPMGVPGRDGVPGGPGETGKNGGFGRRGPPGAKGNKGGPGQPGFEGEQGTRGAQGPAGPAGPPGLIGEQGISGPRGSGGAAGAPGERGRTGPLGRKGEPGEPGPKGGIGNRGPRGETGDDGRDGVGSEGRRGKKGERGFPGYPGPKGNPGEPGLNGTTGPKGIRGRRGNSGPPGIVGQKGDPGYPGPAGPKGNRGDSIDQCALIQSIKDKCPCCYGPLECPVFPTELAFALDTSEGVNQDTFGRMRDVVLSIVNDLTIAESNCPRGARVAVVTYNNEVTTEIRFADSKRKSVLLDKIKNLQVALTSKQQSLETAMSFVARNTFKRVRNGFLMRKVAVFFSNTPTRASPQLREAVLKLSDAGITPLFLTRQEDRQLINALQINNTAVGHALVLPAGRDLTDFLENVLTCHVCLDICNIDPSCGFGSWRPSFRDRRAAGSDVDIDMAFILDSAETTTLFQFNEMKKYIAYLVRQLDMSPDPKASQHFARVAVVQHAPSESVDNASMPPVKVEFSLTDYGSKEKLVDFLSRGMTQLQGTRALGSAIEYTIENVFESAPNPRDLKIVVLMLTGEVPEQQLEEAQRVILQAKCKGYFFVVLGIGRKVNIKEVYTFASEPNDVFFKLVDKSTELNEEPLMRFGRLLPSFVSSENAFYLSPDIRKQCDWFQGDQPTKNLVKFGHKQVNVPNNVTSSPTSNPVTTTKPVTTTKPVTTTTKPVTTTTKPVTIINQPSVKPAAAKPAPAKPVAAKPVATKMATVRPPVAVKPATAAKPVAAKPAAVRPPAAAAAKPVATKPEVPRPQAAKPAATKPATTKPMVKMSREVQVFEITENSAKLHWERAEPPGPYFYDLTVTSAHDQSLVLKQNLTVTDRVIGGLLAGQTYHVAVVCYLRSQVRATYHGSFSTKKSQPPPPQPARSASSSTINLMVSTEPLALTETDICKLPKDEGTCRDFILKWYYDPNTKSCARFWYGGCGGNENKFGSQKECEKVCAPVLAKPGVISVMGT

SEQ ID NO: 78 - protein, 2944 aa, Homo sapiens
MTLRLLVAALCAGILAEAPRVRAQHRERVTCTRLYAADIVFLLDGSSSIGRSNFREVRSFLEGLVLPFSGAASAQGVRFATVQYSDDPRTEFGLDALGSGGDVIRAIRELSYKGGNTRTGAAILHVADHVFLPQLARPGVPKVCILITDGKSQDLVDTAAQRLKGQGVKLFAVGIKNADPEELKRVASQPTSDFFFFVNDFSILRTLLPLVSRRVCTTAGGVPVTRPPDDSTSAPRDLVLSEPSSQSLRVQWTAASGPVTGYKVQYTPLTGLGQPLPSERQEVNVPAGETSVRLRGLRPLTEYQVTVIALYANSIGEAVSGTARTTALEGPELTIQNTTAHSLLVAWRSVPGATGYRVTWRVLSGGPTQQQELGPGQGSVLLRDLEPGTDYEVTVSTLFGRSVGPATSLMARTDASVEQTLRPVILGPTSILLSWNLVPEARGYRLEWRRETGLEPPQKVVLPSDVTRYQLDGLQPGTEYRLTLYTLLEGHEVATPATVVPTGPELPVSPVTDLQATELPGQRVRVSWSPVPGATQYRIIVRSTQGVERTLVLPGSQTAFDLDDVQAGLSYTVRVSARVGPREGSASVLTVRREPETPLAVPGLRVVVSDATRVRVAWGPVPGASGFRISWSTGSGPESSQTLPPDSTATDITGLQPGTTYQVAVSVLRGREEGPAAVIVARTDPLGPVRTVHVTQASSSSVTITWTRVPGATGYRVSWHSAHGPEKSQLVSGEATVAELDGLEPDTEYTVHVRAHVAGVDGPPASVVVRTAPEPVGRVSRLQILNASSDVLRITWVGVTGATAYRLAWGRSEGGPMRHQILPGNTDSAEIRGLEGGVSYSVRVTALVGDREGTPVSIVVTTPPEAPPALGTLHVVQRGEHSLRLRWEPVPRAQGFLLHWQPEGGQEQSRVLGPELSSYHLDGLEPATQYRVRLSVLGPAGEGPSAEVTARTESPRVPSIELRVVDTSIDSVTLAWTPVSRASSYILSWRPLRGPGQEVPGSPQTLPGISSSQRVTGLEPGVSYIFSLTPVLDGVRGPEASVTQTPVCPRGLADVVFLPHATQDNAHRAEATRRVLERLVLALGPLGPQAVQVGLLSYSHRPSPLFPLNGSHDLGIILQRIRDMPYMDPSGNNLGTAVVTAHRYMLAPDAPGRRQHVPGVMVLLVDEPLRGDIFSPIREAQASGLNVVMLGMAGADPEQLRRLAPGMDSVQTFFAVDDGPSLDQAVSGLATALCQASFTTQPRPEPCPVYCPKGQKGEPGEMGLRGQVGPPGDPGLPGRTGAPGPQGPPGSATAKGERGFPGADGRPGSPGRAGNPGTPGAPGLKGSPGLPGPRGDPGERGPRGPKGEPGAPGQVIGGEGPGLPGRKGDPGPSGPPGPRGPLGDPGPRGPPGLPGTAMKGDKGDRGERGPPGPGEGGIAPGEPGLPGLPGSPGPQGPVGPPGKKGEKGDSEDGAPGLPGQPGSPGEQGPRGPPGAIGPKGDRGFPGPLGEAGEKGERGPPGPAGSRGLPGVAGRPGAKGPEGPPGPTGRQGEKGEPGRPGDPAVVGPAVAGPKGEKGDVGPAGPRGATGVQGERGPPGLVLPGDPGPKGDPGDRGPIGLTGRAGPPGDSGPPGEKGDPGRPGPPGPVGPRGRDGEVGEKGDEGPPGDPGLPGKAGERGLRGAPGVRGPVGEKGDQGDPGEDGRNGSPGSSGPKGDRGEPGPPGPPGRLVDTGPGAREKGEPGDRGQEGPRGPKGDPGLPGAPGERGIEGFRGPPGPQGDPGVRGPAGEKGDRGPPGLDGRSGLDGKPGAAGPSGPNGAAGKAGDPGRDGLPGLRGEQGLPGPSGPPGLPGKPGEDGKPGLNGKNGEPGDPGEDGRKGEKGDSGASGREGRDGPKGERGAPGILGPQGPPGLPGPVGPPGQGFPGVPGGTGPKGDRGETGSKGEQGLPGERGLRGEPGSVPNVDRLLETAGIKASALREIVETWDESSGSFLPVPERRRGPKGDSGEQGPPGKEGPIGFPGERGLKGDRGDPGPQGPPGLALGERGPPGPSGLAGEPGKPGIPGLPGRAGGVGEAGRPGERGERGEKGERGEQGRDGPPGLPGTPGPPGPPGPKVSVDEPGPGLSGEQGPPGLKGAKGEPGSNGDQGPKGDRGVPGIKGDRGEPGPRGQDGNPGLPGERGMAGPEGKPGLQGPRGPPGPVGGHGDPGPPGAPGLAGPAGPQGPSGLKGEPGETGPPGRGLTGPTGAVGLPGPPGPSGLVGPQGSPGLPGQVGETGKPGAPGRDGASGKDGDRGSPGVPGSPGLPGPVGPKGEPGPTGAPGQAVVGLPGAKGEKGAPGGLAGDLVGEPGAKGDRGLPGPRGEKGEAGRAGEPGDPGEDGQKGAPGPKGFKGDPGVGVPGSPGPPGPPGVKGDLGLPGLPGAPGVVGFPGQTGPRGEMGQPGPSGERGLAGPPGREGIPGPLGPPGPPGSVGPPGASGLKGDKGDPGVGLPGPRGERGEPGIRGEDGRPGQEGPRGLTGPPGSRGERGEKGDVGSAGLKGDKGDSAVILGPPGPRGAKGDMGERGPRGLDGDKGPRGDNGDPGDKGSKGEPGDKGSAGLPGLRGLLGPQGQPGAAGIPGDPGSPGKDGVPGIRGEKGDVGFMGPRGLKGERGVKGACGLDGEKGDKGEAGPPGRPGLAGHKGEMGEPGVPGQSGAPGKEGLIGPKGDRGFDGQPGPKGDQGEKGERGTPGIGGFPGPSGNDGSAGPPGPPGSVGPRGPEGLQGQKGERGPPGERVVGAPGVPGAPGERGEQGRPGPAGPRGEKGEAALTEDDIRGFVRQEMSQHCACQGQFIASGSRPLPSYAADTAGSQLHAVPVLRVSHAEEEERVPPEDDEYSEYSEYSVEEYQDPEAPWDSDDPCSLPLDEGSCTAYTLRWYHRAVTGSTEACHPFVYGGCGGNANRFGTREACERRCPPRVVQSQGTGTAQD

SEQ ID NO: 79 - protein, 724 aa, Homo sapiens
MAGLTAAAPRPGVLLLLLSILHPSRPGGVPGAIPGGVPGGVFYPGAGLGALGGGALGPGGKPLKPVPGGLAGAGLGAGLGAFPAVTFPGALVPGGVADAAAAYKAAKAGAGLGGVPGVGGLGVSAGAVVPQPGAGVKPGKVPGVGLPGVYPGGVLPGARFPGVGVLPGVPTGAGVKPKAPGVGGAFAGIPGVGPFGGPQPGVPLGYPIKAPKLPGGYGLPYTTGKLPYGYGPGGVAGAAGKAGYPTGTGVGPQAAAAAAAKAAAKFGAGAAGVLPGVGGAGVPGVPGAIPGIGGIAGVGTPAAAAAAAAAAKAAKYGAAAGLVPGGPGFGPGVVGVPGAGVPGVGVPGAGIPVVPGAGIPGAAVPGVVSPEAAAKAAAKAAKYGARPGVGVGGIPTYGVGAGGFPGFGVGVGGIPGVAGVPGVGGVPGVGGVPGVGISPEAQAAAAAKAAKYGVGTPAAAAAKAAAKAAQFGLVPGVGVAPGVGVAPGVGVAPGVGLAPGVGVAPGVGVAPGVGVAPGIGPGGVAAAAKSAAKVAAKAQLRAAAGLGAGIPGLGVGVGVPGLGVGAGVPGLGVGAGVPGFGAVPGALAAAKAAKYGAAVPGVLGGLGALGGVGIPGGVVGAGPAAAAAAAKAAAKAAQFGLVGAAGLGGLGVGGLGVPGVGGLGGIPPAAAAKAAKYGAAGLGGVLGGAGQFPLGGVAARPGFGLSPIFPGGACLGKACGRKRK

SEQ ID NO: 80 - protein, 677 aa, Homo sapiens
MAGLTAAAPRPGVLLLLLSILHPSRPGGVPGAIPGGVPGGVFYPALGPGGKPLKPVPGGLAGAGLGAGLGAFPAVTFPGALVPGGVADAAAAYKAAKAGAGLGGVPGVGGLGVSAGAVVPQPGAGVKPGKVPGVGLPGVYPGGVLPGARFPGVGVLPGVPTGAGVKPKAPGVGGAFAGIPGVGPFGGPQPGVPLGYPIKAPKLPGGYGLPYTTGKLPYGYGPGGVAGAAGKAGYPTGTGVGPQAAAAAAAKAAAKFGAGAAGVLPGVGGAGVPGVPGAIPGIGGIAGVGTPAAAAAAAAAAKAAKYGAAAGLVPGGPGFGPGVVGVPGAGVPGVGVPGAGIPVVPGAGIPGAAVPGVVSPEAAAKAAAKAAKYGARPGVGVGGIPTYGVGAGGFPGFGVGVGGIPGVAGVPGVGGVPGVGGVPGVGISPEAQAAAAAKAAKYGLVPGVGVAPGVGVAPGVGVAPGVGLAPGVGVAPGVGVAPGVGVAPGIGPGGVAAAAKSAAKVAAKAQLRAAAGLGAGIPGLGVGVGVPGLGVGAGVPGLGVGAGVPGFGAVPGALAAAKAAKYGAAVPGVLGGLGALGGVGIPGGVVGAGPAAAAAAAKAAAKAAQFGLVGAAGLGGLGVGGLGVPGVGGLGGIPPAAAAKAAKYGVAARPGFGLSPIFPGGACLGKACGRKRK

SEQ ID NO: 81 - protein, 692 aa, Homo sapiens
MAGLTAAAPRPGVLLLLLSILHPSRPGGVPGAIPGGVPGGVFYPGAGLGALGGGALGPGGKPLKPVPGGLAGAGLGAGLGAFPAVTFPGALVPGGVADAAAAYKAAKAGAGLGGVPGVGGLGVSAAPSVPGAVVPQPGAGVKPGKVPGVGLPGVYPGGVLPGARFPGVGVLPGVPTGAGVKPKAPGVGGAFAGIPGVGPFGGPQPGVPLGYPIKAPKLPGGYGLPYTTGKLPYGYGPGGVAGAAGKAGYPTGTGVGPQAAAAAAAKAAAKFGAGAAGVLPGVGGAGVPGVPGAIPGIGGIAGVGTPAAAAAAAAAAKAAKYGAAAGLVPGGPGFGPGVVGVPGAGVPGVGVPGAGIPVVPGAGIPGAAVPGVVSPEAAAKAAAKAAKYGARPGVGVGGIPTYGVGAGGFPGFGVGVGGIPGVAGVPGVGGVPGVGGVPGVGISPEAQAAAAAKAAKYGLVPGVGVAPGVGVAPGVGVAPGVGLAPGVGVAPGVGVAPGVGVAPGIGPGGVAAAAKSAAKVAAKAQLRAAAGLGAGIPGLGVGVGVPGLGVGAGVPGLGVGAGVPGFGAVPGALAAAKAAKYGAAVPGVLGGLGALGGVGIPGGVVGAGPAAAAAAAKAAAKAAQFGLVGAAGLGGLGVGGLGVPGVGGLGGIPPAAAAKAAKYGVAARPGFGLSPIFPGGACLGKACGRKRK

SEQ ID NO: 82 - protein, 711 aa, Homo sapiens
MAGLTAAAPRPGVLLLLLSILHPSRPGGVPGAIPGGVPGGVFYPGAGLGALGGGALGPGGKPLKPVPGGLAGAGLGAGLGAFPAVTFPGALVPGGVADAAAAYKAAKAGAGLGGVPGVGGLGVSAAPSVPGAVVPQPGAGVKPGKVPGVGLPGVYPGGVLPGARFPGVGVLPGVPTGAGVKPKAPGVGGAFAGIPGVGPFGGPQPGVPLGYPIKAPKLPGGYGLPYTTGKLPYGYGPGGVAGAAGKAGYPTGTGVGPQAAAAAAAKAAAKFGAGAAGVLPGVGGAGVPGVPGAIPGIGGIAGVGTPAAAAAAAAAAKAAKYGAAAGLVPGGPGFGPGVVGVPGAGVPGVGVPGAGIPVVPGAGIPGAAVPGVVSPEAAAKAAAKAAKYGARPGVGVGGIPTYGVGAGGFPGFGVGVGGIPGVAGVPGVGGVPGVGGVPGVGISPEAQAAAAAKAAKYGVGTPAAAAAKAAAKAAQFGLVPGVGVAPGVGVAPGVGVAPGVGLAPGVGVAPGVGVAPGVGVAPGIGPGGVAAAAKSAAKVAAKAQLRAAAGLGAGIPGLGVGVGVPGLGVGAGVPGLGVGAGVPGFGAVPGALAAAKAAKYGAAVPGVLGGLGALGGVGIPGGVVGAGPAAAAAAAKAAAKAAQFGLVGAAGLGGLGVGGLGVPGVGGLGGIPPAAAAKAAKYGVAARPGFGLSPIFPGGACLGKACGRKRK

SEQ ID NO: 83 - protein, 705 aa, Homo sapiens
MAGLTAAAPRPGVLLLLLSILHPSRPGGVPGAIPGGVPGGVFYPGAGLGALGGGALGPGGKPLKPVPGGLAGAGLGAGLGAFPAVTFPGALVPGGVADAAAAYKAAKAGAGLGGVPGVGGLGVSAGAVVPQPGAGVKPGKVPGVGLPGVYPGGVLPGARFPGVGVLPGVPTGAGVKPKAPGVGGAFAGIPGVGPFGGPQPGVPLGYPIKAPKLPGGYGLPYTTGKLPYGYGPGGVAGAAGKAGYPTGTGVGPQAAAAAAAKAAAKFGAGAAGVLPGVGGAGVPGVPGAIPGIGGIAGVGTPAAAAAAAAAAKAAKYGAAAGLVPGGPGFGPGVVGVPGAGVPGVGVPGAGIPVVPGAGIPGAAVPGVVSPEAAAKAAAKAAKYGARPGVGVGGIPTYGVGAGGFPGFGVGVGGIPGVAGVPGVGGVPGVGGVPGVGISPEAQAAAAAKAAKYGLVPGVGVAPGVGVAPGVGVAPGVGLAPGVGVAPGVGVAPGVGVAPGIGPGGVAAAAKSAAKVAAKAQLRAAAGLGAGIPGLGVGVGVPGLGVGAGVPGLGVGAGVPGFGAVPGALAAAKAAKYGAAVPGVLGGLGALGGVGIPGGVVGAGPAAAAAAAKAAAKAAQFGLVGAAGLGGLGVGGLGVPGVGGLGGIPPAAAAKAAKYGAAGLGGVLGGAGQFPLGGVAARPGFGLSPIFPGGACLGKACGRKRK

SEQ ID NO: 84 - protein, 706 aa, Homo sapiens
MAGLTAAAPRPGVLLLLLSILHPSRPGGVPGAIPGGVPGGVFYPGAGLGALGGGALGPGGKPLKPVPGGLAGAGLGAGLGAFPAVTFPGALVPGGVADAAAAYKAAKAGAGLGGVPGVGGLGVSAGAVVPQPGAGVKPGKVPGVGLPGVYPGGVLPGARFPGVGVLPGVPTGAGVKPKAPGVGGAFAGIPGVGPFGGPQPGVPLGYPIKAPKLPGGYGLPYTTGKLPYGYGPGGVAGAAGKAGYPTGTGVGPQAAAAAAAKAAAKFGAGAAGVLPGVGGAGVPGVPGAIPGIGGIAGVGTPAAAAAAAAAAKAAKYGAAAGLVPGGPGFGPGVVGVPGAGVPGVGVPGAGIPVVPGAGIPGAAVPGVVSPEAAAKAAAKAAKYGARPGVGVGGIPTYGVGAGGFPGFGVGVGGIPGVAGVPGVGGVPGVGGVPGVGISPEAQAAAAAKAAKYGVGTPAAAAAKAAAKAAQFGLVPGVGVAPGVGVAPGVGVAPGVGLAPGVGVAPGVGVAPGVGVAPGIGPGGVAAAAKSAAKVAAKAQLRAAAGLGAGIPGLGVGVGVPGLGVGAGVPGLGVGAGVPGFGAVPGALAAAKAAKYGAAVPGVLGGLGALGGVGIPGGVVGAGPAAAAAAAKAAAKAAQFGLVGAAGLGGLGVGGLGVPGVGGLGGIPPAAAAKAAKYGVAARPGFGLSPIFPGGACLGKACGRKRK

SEQ ID NO: 85 - protein, 643 aa, Homo sapiens
MAGLTAAAPRPGVLLLLLSILHPSRPGGVPGAIPGGVPGGVFYPGAGLGALGGGALGPGGKPLKPGLGAFPAVTFPGALVPGGVADAAAAYKAAKAGAGLGGVPGVGGLGVSAGAVVPQPGAGVKPGKVPGVGLPGVYPGGVLPGARFPGVGVLPGVPTGAGVKPKAPGVGPFGGPQPGVPLGYPIKAPKLPGYGPGGVAGAAGKAGYPTGTGVGPQAAAAAAAKAAAKFGAGAAGVLPGVGGAGVPGVPGAIPGIGGIAGVGTPAAAAAAAAAAKAAKYGAAAGLVPGGPGFGPGVVGVPGAGVPGVGVPGAGIPVVPGAGIPGAAVPGVVSPEAAAKAAAKAAKYGARPGVGVGGIPTYGVGAGGFPGFGVGVGAEAQAAAAAKAAKYGLVPGVGVAPGVGVAPGVGVAPGVGLAPGVGVAPGVGVAPGVGVAPGIGPGGVAAAAKSAAKVAAKAQLRAAAGLGAGIPGLGVGVGVPGLGVGAGVPGLGVGAGVPGFGAVPGALAAAKAAKYGAAVPGVLGGLGALGGVGIPGGVVGAGPAAAAAAAKAAAKAAQFGLVGAAGLGGLGVGGLGVPGVGGLGGIPPAAAAKAAKYGAAGLGGVLGGAGQFPLGGVAARPGFGLSPIFPGGACLGKACGRKRK

SEQ ID NO: 86 - protein, 700 aa, Homo sapiens
MAGLTAAAPRPGVLLLLLSILHPSRPGGVPGAIPGGVPGGVFYPALGPGGKPLKPVPGGLAGAGLGAGLGAFPAVTFPGALVPGGVADAAAAYKAAKAGAGLGGVPGVGGLGVSAAPSVPGAVVPQPGAGVKPGKVPGVGLPGVYPGGVLPGARFPGVGVLPGVPTGAGVKPKAPGVGGAFAGIPGVGPFGGPQPGVPLGYPIKAPKLPGGYGLPYTTGKLPYGYGPGGVAGAAGKAGYPTGTGVGPQAAAAAAAKAAAKFGAGAAGVLPGVGGAGVPGVPGAIPGIGGIAGVGTPAAAAAAAAAAKAAKYGAAAGLVPGGPGFGPGVVGVPGAGVPGVGVPGAGIPVVPGAGIPGAAVPGVVSPEAAAKAAAKAAKYGARPGVGVGGIPTYGVGAGGFPGFGVGVGGIPGVAGVPGVGGVPGVGGVPGVGISPEAQAAAAAKAAKYGLVPGVGVAPGVGVAPGVGVAPGVGLAPGVGVAPGVGVAPGVGVAPGIGPGGVAAAAKSAAKVAAKAQLRAAAGLGAGIPGLGVGVGVPGLGVGAGVPGLGVGAGVPGFGAVPGALAAAKAAKYGAAVPGVLGGLGALGGVGIPGGVVGAGPAAAAAAAKAAAKAAQFGLVGAAGLGGLGVGGLGVPGVGGLGGIPPAAAAKAAKYGAAGLGGVLGGAGQFPLGGVAARPGFGLSPIFPGGACLGKACGRKRK

SEQ ID NO: 87 - protein, 730 aa, Homo sapiens
MAGLTAAAPRPGVLLLLLSILHPSRPGGVPGAIPGGVPGGVFYPGAGLGALGGGALGPGGKPLKPVPGGLAGAGLGAGLGAFPAVTFPGALVPGGVADAAAAYKAAKAGAGLGGVPGVGGLGVSAGAVVPQPGAGVKPGKVPGVGLPGVYPGGVLPGARFPGVGVLPGVPTGAGVKPKAPGVGGAFAGIPGVGPFGGPQPGVPLGYPIKAPKLPGGYGLPYTTGKLPYGYGPGGVAGAAGKAGYPTGTGVGPQAAAAAAAKAAAKFGAGAAGVLPGVGGAGVPGVPGAIPGIGGIAGVGTPAAAAAAAAAAKAAKYGAAAGLVPGGPGFGPGVVGVPGAGVPGVGVPGAGIPVVPGAGIPGAAVPGVVSPEAAAKAAAKAAKYGARPGVGVGGIPTYGVGAGGFPGFGVGVGGIPGVAGVPGVGGVPGVGGVPGVGISPEAQAAAAAKAAKYGVGTPAAAAAKAAAKAAQFALLNLAGLVPGVGVAPGVGVAPGVGVAPGVGLAPGVGVAPGVGVAPGVGVAPGIGPGGVAAAAKSAAKVAAKAQLRAAAGLGAGIPGLGVGVGVPGLGVGAGVPGLGVGAGVPGFGAVPGALAAAKAAKYGAAVPGVLGGLGALGGVGIPGGVVGAGPAAAAAAAKAAAKAAQFGLVGAAGLGGLGVGGLGVPGVGGLGGIPPAAAAKAAKYGAAGLGGVLGGAGQFPLGGVAARPGFGLSPIFPGGACLGKACGRKRK

SEQ ID NO: 88 - protein, 658 aa, Homo sapiens
MAGLTAAAPRPGVLLLLLSILHPSRPGGVPGAIPGGVPGGVFYPGAGLGALGGGALGPGGKPLKPVPGGLAGAGLGAGLGAFPAVTFPGALVPGGVADAAAAYKAAKAGAGLGGVPGVGGLGVSAGAVVPQPGAGVKPGKVPGVGLPGVYPGGVLPGARFPGVGVLPGVPTGAGVKPKAPGVGGAFAGIPGVGPFGGPQPGVPLGYPIKAPKLPGYGPGGVAGAAGKAGYPTGTGVGPQAAAAAAAKAAAKFGAGAAGVLPGVGGAGVPGVPGAIPGIGGIAGVGTPAAAAAAAAAAKAAKYGAAAGLVPGGPGFGPGVVGVPGAGVPGVGVPGAGIPVVPGAGIPGAAVPGVVSPEAAAKAAAKAAKYGARPGVGVGGIPTYGVGAGGFPGFGVGVGGIPGVAGVPGVGGVPGVGGVPGVGISPEAQAAAAAKAAKYGLVPGVGVAPGVGVAPGVGVAPGVGLAPGVGVAPGVGVAPGVGVAPGIGPGGVAGAAAGLGAGIPGLGVGVGVPGLGVGAGVPGLGVGAGVPGFGAVPGALAAAKAAKYGAAVPGVLGGLGALGGVGIPGGVVGAGPAAAAAAAKAAAKAAQFGLVGAAGLGGLGVGGLGVPGVGGLGGIPPAAAAKAAKYGVAARPGFGLSPIFPGGACLGKACGRKRK

SEQ ID NO: 89 - protein, 714 aa, Homo sapiens
MAGLTAAAPRPGVLLLLLSILHPSRPGGVPGAIPGGVPGGVFYPALGPGGKPLKPVPGGLAGAGLGAGLGAFPAVTFPGALVPGGVADAAAAYKAAKAGAGLGGVPGVGGLGVSAGAVVPQPGAGVKPGKVPGVGLPGVYPGGVLPGARFPGVGVLPGVPTGAGVKPKAPGVGGAFAGIPGVGPFGGPQPGVPLGYPIKAPKLPGGYGLPYTTGKLPYGYGPGGVAGAAGKAGYPTGTGVGPQAAAAAAAKAAAKFGAGAAGVLPGVGGAGVPGVPGAIPGIGGIAGVGTPAAAAAAAAAAKAAKYGAAAGLVPGGPGFGPGVVGVPGAGVPGVGVPGAGIPVVPGAGIPGAAVPGVVSPEAAAKAAAKAAKYGARPGVGVGGIPTYGVGAGGFPGFGVGVGGIPGVAGVPGVGGVPGVGGVPGVGISPEAQAAAAAKAAKYGVGTPAAAAAKAAAKAAQFGLVPGVGVAPGVGVAPGVGVAPGVGLAPGVGVAPGVGVAPGVGVAPGIGPGGVAAAAKSAAKVAAKAQLRAAAGLGAGIPGLGVGVGVPGLGVGAGVPGLGVGAGVPGFGAVPGALAAAKAAKYGAAVPGVLGGLGALGGVGIPGGVVGAGPAAAAAAAKAAAKAAQFGLVGAAGLGGLGVGGLGVPGVGGLGGIPPAAAAKAAKYGAAGLGGVLGGAGQFPLGGVAARPGFGLSPIFPGGACLGKACGRKRK

SEQ ID NO: 90 - protein, 617 aa, Homo sapiens
MAGLTAAAPRPGVLLLLLSILHPSRPGGVPGAIPGGVPGGVFYPALGPGGKPLKPVPGGLAGAGLGAGLGAFPAVTFPGALVPGGVADAAAAYKAAKAGAGLGGVPGVGGLGVSAGAVVPQPGAGVKPGKVPGVGLPGVYPGGVLPGVGPFGGPQPGVPLGYPIKAPKLPGGYGLPYTTGKLPYGYGPGGVAGAAGKAGYPTGTGVGPQAAAAAAAKAAAKFGAGAAGVLPGVGGAGVPGVPGAIPGIGGIAGVGTPAAAAAAAAAAKAAKYGAAAGLVPGGPGFGPGVVGVPGAGVPGVGVPGAGIPVVPGAGIPGAAVPGVVSPEAAAKAAAKAAKYGARPGVGVGGIPTYGVGAGGFPGFGVGVGAEAQAAAAAKAAKYGLVPGVGVAPGVGVAPGVGVAPGVGLAPGVGVAPGVGVAPGVGVAPGIGPGGVAAAAKSAAKVAAKAQLRAAAGLGAGIPGLGVGVGVPGLGVGAGVPGLGVGAGVPGFGAVPGALAAAKAAKYGAAVPGVLGGLGALGGVGIPGGVVGAGPAAAAAAAKAAAKAAQFGLVGAAGLGGLGVGGLGVPGVGGLGGIPPAAAAKAAKYGVAARPGFGLSPIFPGGACLGKACGRKRK

SEQ ID NO: 91 - protein, 786 aa, Homo sapiens
MAGLTAAAPRPGVLLLLLSILHPSRPGGVPGAIPGGVPGGVFYPGAGLGALGGGALGPGGKPLKPVPGGLAGAGLGAGLGAFPAVTFPGALVPGGVADAAAAYKAAKAGAGLGGVPGVGGLGVSAGAVVPQPGAGVKPGKVPGVGLPGVYPGGVLPGARFPGVGVLPGVPTGAGVKPKAPGVGGAFAGIPGVGPFGGPQPGVPLGYPIKAPKLPGGYGLPYTTGKLPYGYGPGGVAGAAGKAGYPTGTGVGPQAAAAAAAKAAAKFGAGAAGVLPGVGGAGVPGVPGAIPGIGGIAGVGTPAAAAAAAAAAKAAKYGAAAGLVPGGPGFGPGVVGVPGAGVPGVGVPGAGIPVVPGAGIPGAAVPGVVSPEAAAKAAAKAAKYGARPGVGVGGIPTYGVGAGGFPGFGVGVGGIPGVAGVPGVGGVPGVGGVPGVGISPEAQAAAAAKAAKYGAAGAGVLGGLVPGAPGAVPGVPGTGGVPGVGTPAAAAAKAAAKAAQFGLVPGVGVAPGVGVAPGVGVAPGVGLAPGVGVAPGVGVAPGVGVAPGIGPGGVAAAAKSAAKVAAKAQLRAAAGLGAGIPGLGVGVGVPGLGVGAGVPGLGVGAGVPGFGAGADEGVRRSLSPELREGDPSSSQHLPSTPSSPRVPGALAAAKAAKYGAAVPGVLGGLGALGGVGIPGGVVGAGPAAAAAAAKAAAKAAQFGLVGAAGLGGLGVGGLGVPGVGGLGGIPPAAAAKAAKYGAAGLGGVLGGAGQFPLGGVAARPGFGLSPIFPGGACLGKACGRKRK

SEQ ID NO: 92 - protein, 417 aa, Homo sapiens
MRFAWTVLLLGPLQLCALVHCAPPAAGQQQPPREPPAAPGAWRQQIQWENNGQVFSLLSLGSQYQPQRRRDPGAAVPGAANASAQQPRTPILLIRDNRTAAARTRTAGSSGVTAGRPRPTARHWFQAGYSTSRAREAGASRAENQTAPGEVPALSNLRPPSRVDGMVGDDPYNPYKYSDDNPYYNYYDTYERPRPGGRYRPGYGTGYFQYGLPDLVADPYYIQASTYVQKMSMYNLRCAAEENCLASTAYRADVRDYDHRVLLRFPQRVKNQGTSDFLPSRPRYSWEWHSCHQHYHSMDEFSHYDLLDANTQRRVAEGHKASFCLEDTSCDYGYHRRFACTAHTQGLSPGCYDTYGADIDCQWIDITDVKPGNYILKVSVNPSYLVPESDYTNNVVRCDIRYTGHHAYASGCTISPY

SEQ ID NO: 93 - protein, 187 aa, Homo sapiens
MSMYNLRCAAEENCLASTAYRADVRDYDHRVLLRFPQRVKNQGTSDFLPSRPRYSWEWHSCHQHYHSMDEFSHYDLLDANTQRRVAEGHKASFCLEDTSCDYGYHRRFACTAHTQGLSPGCYDTYGADIDCQWIDITDVKPGNYILKVSVNPSYLVPESDYTNNVVRCDIRYTGHHAYASGCTISPY

SEQ ID NO: 94 - protein, 1132 aa, Homo sapiens
MPRAPRCRAVRSLLRSHYREVLPLATFVRRLGPQGWRLVQRGDPAAFRALVAQCLVCVPWDARPPPAAPSFRQVSCLKELVARVLQRLCERGAKNVLAFGFALLDGARGGPPEAFTTSVRSYLPNTVTDALRGSGAWGLLLRRVGDDVLVHLLARCALFVLVAPSCAYQVCGPPLYQLGAATQARPPPHASGPRRRLGCERAWNHSVREAGVPLGLPAPGARRRGGSASRSLPLPKRPRRGAAPEPERTPVGQGSWAHPGRTRGPSDRGFCVVSPARPAEEATSLEGALSGTRHSHPSVGRQHHAGPPSTSRPPRPWDTPCPPVYAETKHFLYSSGDKEQLRPSFLLSSLRPSLTGARRLVETIFLGSRPWMPGTPRRLPRLPQRYWQMRPLFLELLGNHAQCPYGVLLKTHCPLRAAVTPAAGVCAREKPQGSVAAPEEEDTDPRRLVQLLRQHSSPWQVYGFVRACLRRLVPPGLWGSRHNERRFLRNTKKFISLGKHAKLSLQELTWKMSVRDCAWLRRSPGVGCVPAAEHRLREEILAKFLHWLMSVYVVELLRSFFYVTETTFQKNRLFFYRKSVWSKLQSIGIRQHLKRVQLRELSEAEVRQHREARPALLTSRLRFIPKPDGLRPIVNMDYVVGARTFRREKRAERLTSRVKALFSVLNYERARRPGLLGASVLGLDDIHRAWRTFVLRVRAQDPPPELYFVKVDVTGAYDTIPQDRLTEVIASIIKPQNTYCVRRYAVVQKAAHGHVRKAFKSHVSTLTDLQPYMRQFVAHLQETSPLRDAVVIEQSSSLNEASSGLFDVFLRFMCHHAVRIRGKSYVQCQGIPQGSILSTLLCSLCYGDMENKLFAGIRRDGLLLRLVDDFLLVTPHLTHAKTFLRTLVRGVPEYGCVVNLRKTVVNFPVEDEALGGTAFVQMPAHGLFPWCGLLLDTRTLEVQSDYSSYARTSIRASLTFNRGFKAGRNMRRKLFGVLRLKCHSLFLDLQVNSLQTVCTNIYKILLLQAYRFHACVLQLPFHQQVWKNPTFFLRVISDTASLCYSILKAKNAGMSLGAKGAAGPLPSEAVQWLCHQAFLLKLTRHRVTYVPLLGSLRTAQTQLSRKLPGTTLTALEAAANPALPSDFKTILD

SEQ ID NO: 95 - protein, 1069 aa, Homo sapiens
MPRAPRCRAVRSLLRSHYREVLPLATFVRRLGPQGWRLVQRGDPAAFRALVAQCLVCVPWDARPPPAAPSFRQVSCLKELVARVLQRLCERGAKNVLAFGFALLDGARGGPPEAFTTSVRSYLPNTVTDALRGSGAWGLLLRRVGDDVLVHLLARCALFVLVAPSCAYQVCGPPLYQLGAATQARPPPHASGPRRRLGCERAWNHSVREAGVPLGLPAPGARRRGGSASRSLPLPKRPRRGAAPEPERTPVGQGSWAHPGRTRGPSDRGFCVVSPARPAEEATSLEGALSGTRHSHPSVGRQHHAGPPSTSRPPRPWDTPCPPVYAETKHFLYSSGDKEQLRPSFLLSSLRPSLTGARRLVETIFLGSRPWMPGTPRRLPRLPQRYWQMRPLFLELLGNHAQCPYGVLLKTHCPLRAAVTPAAGVCAREKPQGSVAAPEEEDTDPRRLVQLLRQHSSPWQVYGFVRACLRRLVPPGLWGSRHNERRFLRNTKKFISLGKHAKLSLQELTWKMSVRDCAWLRRSPGVGCVPAAEHRLREEILAKFLHWLMSVYVVELLRSFFYVTETTFQKNRLFFYRKSVWSKLQSIGIRQHLKRVQLRELSEAEVRQHREARPALLTSRLRFIPKPDGLRPIVNMDYVVGARTFRREKRAERLTSRVKALFSVLNYERARRPGLLGASVLGLDDIHRAWRTFVLRVRAQDPPPELYFVKVDVTGAYDTIPQDRLTEVIASIIKPQNTYCVRRYAVVQKAAHGHVRKAFKSHVSTLTDLQPYMRQFVAHLQETSPLRDAVVIEQSSSLNEASSGLFDVFLRFMCHHAVRIRGKSYVQCQGIPQGSILSTLLCSLCYGDMENKLFAGIRRDGLLLRLVDDFLLVTPHLTHAKTFLSYARTSIRASLTFNRGFKAGRNMRRKLFGVLRLKCHSLFLDLQVNSLQTVCTNIYKILLLQAYRFHACVLQLPFHQQVWKNPTFFLRVISDTASLCYSILKAKNAGMSLGAKGAAGPLPSEAVQWLCHQAFLLKLTRHRVTYVPLLGSLRTAQTQLSRKLPGTTLTALEAAANPALPSDFKTILD

SEQ ID NO: 96 - protein, 2477 aa, Homo sapiens
MLRGPGPGLLLLAVQCLGTAVPSTGASKSKRQAQQMVQPQSPVAVSQSKPGCYDNGKHYQINQQWERTYLGNALVCTCYGGSRGFNCESKPEAEETCFDKYTGNTYRVGDTYERPKDSMIWDCTCIGAGRGRISCTIANRCHEGGQSYKIGDTWRRPHETGGYMLECVCLGNGKGEWTCKPIAEKCFDHAAGTSYVVGETWEKPYQGWMMVDCTCLGEGSGRITCTSRNRCNDQDTRTSYRIGDTWSKKDNRGNLLQCICTGNGRGEWKCERHTSVQTTSSGSGPFTDVRAAVYQPQPHPQPPPYGHCVTDSGVVYSVGMQWLKTQGNKQMLCTCLGNGVSCQETAVTQTYGGNSNGEPCVLPFTYNGRTFYSCTTEGRQDGHLWCSTTSNYEQDQKYSFCTDHTVLVQTRGGNSNGALCHFPFLYNNHNYTDCTSEGRRDNMKWCGTTQNYDADQKFGFCPMAAHEEICTTNEGVMYRIGDQWDKQHDMGHMMRCTCVGNGRGEWTCIAYSQLRDQCIVDDITYNVNDTFHKRHEEGHMLNCTCFGQGRGRWKCDPVDQCQDSETGTFYQIGDSWEKYVHGVRYQCYCYGRGIGEWHCQPLQTYPSSSGPVEVFITETPSQPNSHPIQWNAPQPSHISKYILRWRPKNSVGRWKEATIPGHLNSYTIKGLKPGVVYEGQLISIQQYGHQEVTRFDFTTTSTSTPVTSNTVTGETTPFSPLVATSESVTEITASSFVVSWVSASDTVSGFRVEYELSEEGDEPQYLDLPSTATSVNIPDLLPGRKYIVNVYQISEDGEQSLILSTSQTTAPDAPPDPTVDQVDDTSIVVRWSRPQAPITGYRIVYSPSVEGSSTELNLPETANSVTLSDLQPGVQYNITIYAVEENQESTPVVIQQETTGTPRSDTVPSPRDLQFVEVTDVKVTIMWTPPESAVTGYRVDVIPVNLPGEHGQRLPISRNTFAEVTGLSPGVTYYFKVFAVSHGRESKPLTAQQTTKLDAPTNLQFVNETDSTVLVRWTPPRAQITGYRLTVGLTRRGQPRQYNVGPSVSKYPLRNLQPASEYTVSLVAIKGNQESPKATGVFTTLQPGSSIPPYNTEVTETTIVITWTPAPRIGFKLGVRPSQGGEAPREVTSDSGSIVVSGLTPGVEYVYTIQVLRDGQERDAPIVNKVVTPLSPPTNLHLEANPDTGVLTVSWERSTTPDITGYRITTTPTNGQQGNSLEEVVHADQSSCTFDNLSPGLEYNVSVYTVKDDKESVPISDTIIPEVPQLTDLSFVDITDSSIGLRWTPLNSSTIIGYRITVVAAGEGIPIFEDFVDSSVGYYTVTGLEPGIDYDISVITLINGGESAPTTLTQQTAVPPPTDLRFTNIGPDTMRVTWAPPPSIDLTNFLVRYSPVKNEEDVAELSISPSDNAVVLTNLLPGTEYVVSVSSVYEQHESTPLRGRQKTGLDSPTGIDFSDITANSFTVHWIAPRATITGYRIRHHPEHFSGRPREDRVPHSRNSITLTNLTPGTEYVVSIVALNGREESPLLIGQQSTVSDVPRDLEVVAATPTSLLISWDAPAVTVRYYRITYGETGGNSPVQEFTVPGSKSTATISGLKPGVDYTITVYAVTGRGDSPASSKPISINYRTEIDKPSQMQVTDVQDNSISVKWLPSSSPVTGYRVTTTPKNGPGPTKTKTAGPDQTEMTIEGLQPTVEYVVSVYAQNPSGESQPLVQTAVTNIDRPKGLAFTDVDVDSIKIAWESPQGQVSRYRVTYSSPEDGIHELFPAPDGEEDTAELQGLRPGSEYTVSVVALHDDMESQPLIGTQSTAIPAPTDLKFTQVTPTSLSAQWTPPNVQLTGYRVRVTPKEKTGPMKEINLAPDSSSVVVSGLMVATKYEVSVYALKDTLTSRPAQGVVTTLENVSPPRRARVTDATETTITISWRTKTETITGFQVDAVPANGQTPIQRTIKPDVRSYTITGLQPGTDYKIYLYTLNDNARSSPVVIDASTAIDAPSNLRFLATTPNSLLVSWQPPRARITGYIIKYEKPGSPPREVVPRPRPGVTEATITGLEPGTEYTIYVIALKNNQKSEPLIGRKKTDELPQLVTLPHPNLHGPEILDVPSTVQKTPFVTHPGYDTGNGIQLPGTSGQQPSVGQQMIFEEHGFRRTTPPTTATPIRHRPRPYPPNVGEEIQIGHIPREDVDYHLYPHGPGLNPNASTGQEALSQTTISWAPFQDTSEYIISCHPVGTDEEPLQFRVPGTSTSATLTGLTRGATYNIIVEALKDQQRHKVREEVVTVGNSVNEGLNQPTDDSCFDPYTVSHYAVGDEWERMSESGFKLLCQCLGFGSGHFRCDSSRWCHDNGVNYKIGEKWDRQGENGQMMSCTCLGNGKGEFKCDPHEATCYDDGKTYHVGEQWQKEYLGAICSCTCFGGQRGWRCDNCRRPGGEPSPEGTTGQSYNQYSQRYHQRTNTNVNCPIECFMPLDVQADREDSRE

SEQ ID NO: 97 - protein, 2355 aa, Homo sapiens
MLRGPGPGLLLLAVQCLGTAVPSTGASKSKRQAQQMVQPQSPVAVSQSKPGCYDNGKHYQINQQWERTYLGNALVCTCYGGSRGFNCESKPEAEETCFDKYTGNTYRVGDTYERPKDSMIWDCTCIGAGRGRISCTIANRCHEGGQSYKIGDTWRRPHETGGYMLECVCLGNGKGEWTCKPIAEKCFDHAAGTSYVVGETWEKPYQGWMMVDCTCLGEGSGRITCTSRNRCNDQDTRTSYRIGDTWSKKDNRGNLLQCICTGNGRGEWKCERHTSVQTTSSGSGPFTDVRAAVYQPQPHPQPPPYGHCVTDSGVVYSVGMQWLKTQGNKQMLCTCLGNGVSCQETAVTQTYGGNSNGEPCVLPFTYNGRTFYSCTTEGRQDGHLWCSTTSNYEQDQKYSFCTDHTVLVQTRGGNSNGALCHFPFLYNNHNYTDCTSEGRRDNMKWCGTTQNYDADQKFGFCPMAAHEEICTTNEGVMYRIGDQWDKQHDMGHMMRCTCVGNGRGEWTCIAYSQLRDQCIVDDITYNVNDTFHKRHEEGHMLNCTCFGQGRGRWKCDPVDQCQDSETGTFYQIGDSWEKYVHGVRYQCYCYGRGIGEWHCQPLQTYPSSSGPVEVFITETPSQPNSHPIQWNAPQPSHISKYILRWRPKNSVGRWKEATIPGHLNSYTIKGLKPGVVYEGQLISIQQYGHQEVTRFDFTTTSTSTPVTSNTVTGETTPFSPLVATSESVTEITASSFVVSWVSASDTVSGFRVEYELSEEGDEPQYLDLPSTATSVNIPDLLPGRKYIVNVYQISEDGEQSLILSTSQTTAPDAPPDPTVDQVDDTSIVVRWSRPQAPITGYRIVYSPSVEGSSTELNLPETANSVTLSDLQPGVQYNITIYAVEENQESTPVVIQQETTGTPRSDTVPSPRDLQFVEVTDVKVTIMWTPPESAVTGYRVDVIPVNLPGEHGQRLPISRNTFAEVTGLSPGVTYYFKVFAVSHGRESKPLTAQQTTKLDAPTNLQFVNETDSTVLVRWTPPRAQITGYRLTVGLTRRGQPRQYNVGPSVSKYPLRNLQPASEYTVSLVAIKGNQESPKATGVFTTLQPGSSIPPYNTEVTETTIVITWTPAPRIGFKLGVRPSQGGEAPREVTSDSGSIVVSGLTPGVEYVYTIQVLRDGQERDAPIVNKVVTPLSPPTNLHLEANPDTGVLTVSWERSTTPDITGYRITTTPTNGQQGNSLEEVVHADQSSCTFDNLSPGLEYNVSVYTVKDDKESVPISDTIIPAVPPPTDLRFTNIGPDTMRVTWAPPPSIDLTNFLVRYSPVKNEEDVAELSISPSDNAVVLTNLLPGTEYVVSVSSVYEQHESTPLRGRQKTGLDSPTGIDFSDITANSFTVHWIAPRATITGYRIRHHPEHFSGRPREDRVPHSRNSITLTNLTPGTEYVVSIVALNGREESPLLIGQQSTVSDVPRDLEVVAATPTSLLISWDAPAVTVRYYRITYGETGGNSPVQEFTVPGSKSTATISGLKPGVDYTITVYAVTGRGDSPASSKPISINYRTEIDKPSQMQVTDVQDNSISVKWLPSSSPVTGYRVTTTPKNGPGPTKTKTAGPDQTEMTIEGLQPTVEYVVSVYAQNPSGESQPLVQTAVTNIDRPKGLAFTDVDVDSIKIAWESPQGQVSRYRVTYSSPEDGIHELFPAPDGEEDTAELQGLRPGSEYTVSVVALHDDMESQPLIGTQSTAIPAPTDLKFTQVTPTSLSAQWTPPNVQLTGYRVRVTPKEKTGPMKEINLAPDSSSVVVSGLMVATKYEVSVYALKDTLTSRPAQGVVTTLENVSPPRRARVTDATETTITISWRTKTETITGFQVDAVPANGQTPIQRTIKPDVRSYTITGLQPGTDYKIYLYTLNDNARSSPVVIDASTAIDAPSNLRFLATTPNSLLVSWQPPRARITGYIIKYEKPGSPPREVVPRPRPGVTEATITGLEPGTEYTIYVIALKNNQKSEPLIGRKKTDELPQLVTLPHPNLHGPEILDVPSTVQKTPFVTHPGYDTGNGIQLPGTSGQQPSVGQQMIFEEHGFRRTTPPTTATPIRHRPRPYPPNVGQEALSQTTISWAPFQDTSEYIISCHPVGTDEEPLQFRVPGTSTSATLTGLTRGATYNIIVEALKDQQRHKVREEVVTVGNSVNEGLNQPTDDSCFDPYTVSHYAVGDEWERMSESGFKLLCQCLGFGSGHFRCDSSRWCHDNGVNYKIGEKWDRQGENGQMMSCTCLGNGKGEFKCDPHEATCYDDGKTYHVGEQWQKEYLGAICSCTCFGGQRGWRCDNCRRPGGEPSPEGTTGQSYNQYSQRYHQRTNTNVNCPIECFMPLDVQADREDSRE

SEQ ID NO: 98 - protein, 2330 aa, Homo sapiens
MLRGPGPGLLLLAVQCLGTAVPSTGASKSKRQAQQMVQPQSPVAVSQSKPGCYDNGKHYQINQQWERTYLGNALVCTCYGGSRGFNCESKPEAEETCFDKYTGNTYRVGDTYERPKDSMIWDCTCIGAGRGRISCTIANRCHEGGQSYKIGDTWRRPHETGGYMLECVCLGNGKGEWTCKPIAEKCFDHAAGTSYVVGETWEKPYQGWMMVDCTCLGEGSGRITCTSRNRCNDQDTRTSYRIGDTWSKKDNRGNLLQCICTGNGRGEWKCERHTSVQTTSSGSGPFTDVRAAVYQPQPHPQPPPYGHCVTDSGVVYSVGMQWLKTQGNKQMLCTCLGNGVSCQETAVTQTYGGNSNGEPCVLPFTYNGRTFYSCTTEGRQDGHLWCSTTSNYEQDQKYSFCTDHTVLVQTRGGNSNGALCHFPFLYNNHNYTDCTSEGRRDNMKWCGTTQNYDADQKFGFCPMAAHEEICTTNEGVMYRIGDQWDKQHDMGHMMRCTCVGNGRGEWTCIAYSQLRDQCIVDDITYNVNDTFHKRHEEGHMLNCTCFGQGRGRWKCDPVDQCQDSETGTFYQIGDSWEKYVHGVRYQCYCYGRGIGEWHCQPLQTYPSSSGPVEVFITETPSQPNSHPIQWNAPQPSHISKYILRWRPKNSVGRWKEATIPGHLNSYTIKGLKPGVVYEGQLISIQQYGHQEVTRFDFTTTSTSTPVTSNTVTGETTPFSPLVATSESVTEITASSFVVSWVSASDTVSGFRVEYELSEEGDEPQYLDLPSTATSVNIPDLLPGRKYIVNVYQISEDGEQSLILSTSQTTAPDAPPDPTVDQVDDTSIVVRWSRPQAPITGYRIVYSPSVEGSSTELNLPETANSVTLSDLQPGVQYNITIYAVEENQESTPVVIQQETTGTPRSDTVPSPRDLQFVEVTDVKVTIMWTPPESAVTGYRVDVIPVNLPGEHGQRLPISRNTFAEVTGLSPGVTYYFKVFAVSHGRESKPLTAQQTTKLDAPTNLQFVNETDSTVLVRWTPPRAQITGYRLTVGLTRRGQPRQYNVGPSVSKYPLRNLQPASEYTVSLVAIKGNQESPKATGVFTTLQPGSSIPPYNTEVTETTIVITWTPAPRIGFKLGVRPSQGGEAPREVTSDSGSIVVSGLTPGVEYVYTIQVLRDGQERDAPIVNKVVTPLSPPTNLHLEANPDTGVLTVSWERSTTPDITGYRITTTPTNGQQGNSLEEVVHADQSSCTFDNLSPGLEYNVSVYTVKDDKESVPISDTIIPAVPPPTDLRFTNIGPDTMRVTWAPPPSIDLTNFLVRYSPVKNEEDVAELSISPSDNAVVLTNLLPGTEYVVSVSSVYEQHESTPLRGRQKTGLDSPTGIDFSDITANSFTVHWIAPRATITGYRIRHHPEHFSGRPREDRVPHSRNSITLTNLTPGTEYVVSIVALNGREESPLLIGQQSTVSDVPRDLEVVAATPTSLLISWDAPAVTVRYYRITYGETGGNSPVQEFTVPGSKSTATISGLKPGVDYTITVYAVTGRGDSPASSKPISINYRTEIDKPSQMQVTDVQDNSISVKWLPSSSPVTGYRVTTTPKNGPGPTKTKTAGPDQTEMTIEGLQPTVEYVVSVYAQNPSGESQPLVQTAVTNIDRPKGLAFTDVDVDSIKIAWESPQGQVSRYRVTYSSPEDGIHELFPAPDGEEDTAELQGLRPGSEYTVSVVALHDDMESQPLIGTQSTAIPAPTDLKFTQVTPTSLSAQWTPPNVQLTGYRVRVTPKEKTGPMKEINLAPDSSSVVVSGLMVATKYEVSVYALKDTLTSRPAQGVVTTLENVSPPRRARVTDATETTITISWRTKTETITGFQVDAVPANGQTPIQRTIKPDVRSYTITGLQPGTDYKIYLYTLNDNARSSPVVIDASTAIDAPSNLRFLATTPNSLLVSWQPPRARITGYIIKYEKPGSPPREVVPRPRPGVTEATITGLEPGTEYTIYVIALKNNQKSEPLIGRKKTVQKTPFVTHPGYDTGNGIQLPGTSGQQPSVGQQMIFEEHGFRRTTPPTTATPIRHRPRPYPPNVGQEALSQTTISWAPFQDTSEYIISCHPVGTDEEPLQFRVPGTSTSATLTGLTRGATYNIIVEALKDQQRHKVREEVVTVGNSVNEGLNQPTDDSCFDPYTVSHYAVGDEWERMSESGFKLLCQCLGFGSGHFRCDSSRWCHDNGVNYKIGEKWDRQGENGQMMSCTCLGNGKGEFKCDPHEATCYDDGKTYHVGEQWQKEYLGAICSCTCFGGQRGWRCDNCRRPGGEPSPEGTTGQSYNQYSQRYHQRTNTNVNCPIECFMPLDVQADREDSRE

SEQ ID NO: 99 - protein, 2296 aa, Homo sapiens
MLRGPGPGLLLLAVQCLGTAVPSTGASKSKRQAQQMVQPQSPVAVSQSKPGCYDNGKHYQINQQWERTYLGNALVCTCYGGSRGFNCESKPEAEETCFDKYTGNTYRVGDTYERPKDSMIWDCTCIGAGRGRISCTIANRCHEGGQSYKIGDTWRRPHETGGYMLECVCLGNGKGEWTCKPIAEKCFDHAAGTSYVVGETWEKPYQGWMMVDCTCLGEGSGRITCTSRNRCNDQDTRTSYRIGDTWSKKDNRGNLLQCICTGNGRGEWKCERHTSVQTTSSGSGPFTDVRAAVYQPQPHPQPPPYGHCVTDSGVVYSVGMQWLKTQGNKQMLCTCLGNGVSCQETAVTQTYGGNSNGEPCVLPFTYNGRTFYSCTTEGRQDGHLWCSTTSNYEQDQKYSFCTDHTVLVQTRGGNSNGALCHFPFLYNNHNYTDCTSEGRRDNMKWCGTTQNYDADQKFGFCPMAAHEEICTTNEGVMYRIGDQWDKQHDMGHMMRCTCVGNGRGEWTCIAYSQLRDQCIVDDITYNVNDTFHKRHEEGHMLNCTCFGQGRGRWKCDPVDQCQDSETGTFYQIGDSWEKYVHGVRYQCYCYGRGIGEWHCQPLQTYPSSSGPVEVFITETPSQPNSHPIQWNAPQPSHISKYILRWRPKNSVGRWKEATIPGHLNSYTIKGLKPGVVYEGQLISIQQYGHQEVTRFDFTTTSTSTPVTSNTVTGETTPFSPLVATSESVTEITASSFVVSWVSASDTVSGFRVEYELSEEGDEPQYLDLPSTATSVNIPDLLPGRKYIVNVYQISEDGEQSLILSTSQTTAPDAPPDPTVDQVDDTSIVVRWSRPQAPITGYRIVYSPSVEGSSTELNLPETANSVTLSDLQPGVQYNITIYAVEENQESTPVVIQQETTGTPRSDTVPSPRDLQFVEVTDVKVTIMWTPPESAVTGYRVDVIPVNLPGEHGQRLPISRNTFAEVTGLSPGVTYYFKVFAVSHGRESKPLTAQQTTKLDAPTNLQFVNETDSTVLVRWTPPRAQITGYRLTVGLTRRGQPRQYNVGPSVSKYPLRNLQPASEYTVSLVAIKGNQESPKATGVFTTLQPGSSIPPYNTEVTETTIVITWTPAPRIGFKLGVRPSQGGEAPREVTSDSGSIVVSGLTPGVEYVYTIQVLRDGQERDAPIVNKVVTPLSPPTNLHLEANPDTGVLTVSWERSTTPDITGYRITTTPTNGQQGNSLEEVVHADQSSCTFDNLSPGLEYNVSVYTVKDDKESVPISDTIIPAVPPPTDLRFTNIGPDTMRVTWAPPPSIDLTNFLVRYSPVKNEEDVAELSISPSDNAVVLTNLLPGTEYVVSVSSVYEQHESTPLRGRQKTGLDSPTGIDFSDITANSFTVHWIAPRATITGYRIRHHPEHFSGRPREDRVPHSRNSITLTNLTPGTEYVVSIVALNGREESPLLIGQQSTVSDVPRDLEVVAATPTSLLISWDAPAVTVRYYRITYGETGGNSPVQEFTVPGSKSTATISGLKPGVDYTITVYAVTGRGDSPASSKPISINYRTEIDKPSQMQVTDVQDNSISVKWLPSSSPVTGYRVTTTPKNGPGPTKTKTAGPDQTEMTIEGLQPTVEYVVSVYAQNPSGESQPLVQTAVTTIPAPTDLKFTQVTPTSLSAQWTPPNVQLTGYRVRVTPKEKTGPMKEINLAPDSSSVVVSGLMVATKYEVSVYALKDTLTSRPAQGVVTTLENVSPPRRARVTDATETTITISWRTKTETITGFQVDAVPANGQTPIQRTIKPDVRSYTITGLQPGTDYKIYLYTLNDNARSSPVVIDASTAIDAPSNLRFLATTPNSLLVSWQPPRARITGYIIKYEKPGSPPREVVPRPRPGVTEATITGLEPGTEYTIYVIALKNNQKSEPLIGRKKTDELPQLVTLPHPNLHGPEILDVPSTVQKTPFVTHPGYDTGNGIQLPGTSGQQPSVGQQMIFEEHGFRRTTPPTTATPIRHRPRPYPPNVGEEIQIGHIPREDVDYHLYPHGPGLNPNASTGQEALSQTTISWAPFQDTSEYIISCHPVGTDEEPLQFRVPGTSTSATLTGLTRGATYNIIVEALKDQQRHKVREEVVTVGNSVNEGLNQPTDDSCFDPYTVSHYAVGDEWERMSESGFKLLCQCLGFGSGHFRCDSSRWCHDNGVNYKIGEKWDRQGENGQMMSCTCLGNGKGEFKCDPHEATCYDDGKTYHVGEQWQKEYLGAICSCTCFGGQRGWRCDNCRRPGGEPSPEGTTGQSYNQYSQRYHQRTNTNVNCPIECFMPLDVQADREDSRE

SEQ ID NO: 100 - protein, 2176 aa, Homo sapiens
MLRGPGPGLLLLAVQCLGTAVPSTGASKSKRQAQQMVQPQSPVAVSQSKPGCYDNGKHYQINQQWERTYLGNALVCTCYGGSRGFNCESKPEAEETCFDKYTGNTYRVGDTYERPKDSMIWDCTCIGAGRGRISCTIANRCHEGGQSYKIGDTWRRPHETGGYMLECVCLGNGKGEWTCKPIAEKCFDHAAGTSYVVGETWEKPYQGWMMVDCTCLGEGSGRITCTSRNRCNDQDTRTSYRIGDTWSKKDNRGNLLQCICTGNGRGEWKCERHTSVQTTSSGSGPFTDVRAAVYQPQPHPQPPPYGHCVTDSGVVYSVGMQWLKTQGNKQMLCTCLGNGVSCQETAVTQTYGGNSNGEPCVLPFTYNGRTFYSCTTEGRQDGHLWCSTTSNYEQDQKYSFCTDHTVLVQTRGGNSNGALCHFPFLYNNHNYTDCTSEGRRDNMKWCGTTQNYDADQKFGFCPMAAHEEICTTNEGVMYRIGDQWDKQHDMGHMMRCTCVGNGRGEWTCIAYSQLRDQCIVDDITYNVNDTFHKRHEEGHMLNCTCFGQGRGRWKCDPVDQCQDSETGTFYQIGDSWEKYVHGVRYQCYCYGRGIGEWHCQPLQTYPSSSGPVEVFITETPSQPNSHPIQWNAPQPSHISKYILRWRPKNSVGRWKEATIPGHLNSYTIKGLKPGVVYEGQLISIQQYGHQEVTRFDFTTTSTSTPVTSNTVTGETTPFSPLVATSESVTEITASSFVVSWVSASDTVSGFRVEYELSEEGDEPQYLDLPSTATSVNIPDLLPGRKYIVNVYQISEDGEQSLILSTSQTTAPDAPPDPTVDQVDDTSIVVRWSRPQAPITGYRIVYSPSVEGSSTELNLPETANSVTLSDLQPGVQYNITIYAVEENQESTPVVIQQETTGTPRSDTVPSPRDLQFVEVTDVKVTIMWTPPESAVTGYRVDVIPVNLPGEHGQRLPISRNTFAEVTGLSPGVTYYFKVFAVSHGRESKPLTAQQTTKLDAPTNLQFVNETDSTVLVRWTPPRAQITGYRLTVGLTRRGQPRQYNVGPSVSKYPLRNLQPASEYTVSLVAIKGNQESPKATGVFTTLQPGSSIPPYNTEVTETTIVITWTPAPRIGFKLGVRPSQGGEAPREVTSDSGSIVVSGLTPGVEYVYTIQVLRDGQERDAPIVNKVVTPLSPPTNLHLEANPDTGVLTVSWERSTTPDITGYRITTTPTNGQQGNSLEEVVHADQSSCTFDNLSPGLEYNVSVYTVKDDKESVPISDTIIPAVPPPTDLRFTNIGPDTMRVTWAPPPSIDLTNFLVRYSPVKNEEDVAELSISPSDNAVVLTNLLPGTEYVVSVSSVYEQHESTPLRGRQKTGLDSPTGIDFSDITANSFTVHWIAPRATITGYRIRHHPEHFSGRPREDRVPHSRNSITLTNLTPGTEYVVSIVALNGREESPLLIGQQSTVSDVPRDLEVVAATPTSLLISWDAPAVTVRYYRITYGETGGNSPVQEFTVPGSKSTATISGLKPGVDYTITVYAVTGRGDSPASSKPISINYRTEIDKPSQMQVTDVQDNSISVKWLPSSSPVTGYRVTTTPKNGPGPTKTKTAGPDQTEMTIEGLQPTVEYVVSVYAQNPSGESQPLVQTAVTTIPAPTDLKFTQVTPTSLSAQWTPPNVQLTGYRVRVTPKEKTGPMKEINLAPDSSSVVVSGLMVATKYEVSVYALKDTLTSRPAQGVVTTLENVSPPRRARVTDATETTITISWRTKTETITGFQVDAVPANGQTPIQRTIKPDVRSYTITGLQPGTDYKIYLYTLNDNARSSPVVIDASTAIDAPSNLRFLATTPNSLLVSWQPPRARITGYIIKYEKPGSPPREVVPRPRPGVTEATITGLEPGTEYTIYVIALKNNQKSEPLIGRKKTGQEALSQTTISWAPFQDTSEYIISCHPVGTDEEPLQFRVPGTSTSATLTGLTRGATYNIIVEALKDQQRHKVREEVVTVGNSVNEGLNQPTDDSCFDPYTVSHYAVGDEWERMSESGFKLLCQCLGFGSGHFRCDSSRWCHDNGVNYKIGEKWDRQGENGQMMSCTCLGNGKGEFKCDPHEATCYDDGKTYHVGEQWQKEYLGAICSCTCFGGQRGWRCDNCRRPGGEPSPEGTTGQSYNQYSQRYHQRTNTNVNCPIECFMPLDVQADREDSRE

SEQ ID NO: 101 - protein, 657 aa, Homo sapiens
MLRGPGPGLLLLAVQCLGTAVPSTGASKSKRQAQQMVQPQSPVAVSQSKPGCYDNGKHYQINQQWERTYLGNALVCTCYGGSRGFNCESKPEAEETCFDKYTGNTYRVGDTYERPKDSMIWDCTCIGAGRGRISCTIANRCHEGGQSYKIGDTWRRPHETGGYMLECVCLGNGKGEWTCKPIAEKCFDHAAGTSYVVGETWEKPYQGWMMVDCTCLGEGSGRITCTSRNRCNDQDTRTSYRIGDTWSKKDNRGNLLQCICTGNGRGEWKCERHTSVQTTSSGSGPFTDVRAAVYQPQPHPQPPPYGHCVTDSGVVYSVGMQWLKTQGNKQMLCTCLGNGVSCQETAVTQTYGGNSNGEPCVLPFTYNGRTFYSCTTEGRQDGHLWCSTTSNYEQDQKYSFCTDHTVLVQTRGGNSNGALCHFPFLYNNHNYTDCTSEGRRDNMKWCGTTQNYDADQKFGFCPMAAHEEICTTNEGVMYRIGDQWDKQHDMGHMMRCTCVGNGRGEWTCIAYSQLRDQCIVDDITYNVNDTFHKRHEEGHMLNCTCFGQGRGRWKCDPVDQCQDSETGTFYQIGDSWEKYVHGVRYQCYCYGRGIGEWHCQPLQTYPSSSGPVEVFITETPSQPNSHPIQWNAPQPSHISKYILRWRPVSIPPRNLGY

SEQ ID NO: 102 - protein, 478 aa, Homo sapiens
MAPLRPLLILALLAWVALADQESCKGRCTEGFNVDKKCQCDELCSYYQSCCTDYTAECKPQVTRGDVFTMPEDEYTVYDDGEEKNNATVHEQVGGPSLTSDLQAQSKGNPEQTPVLKPEEEAPAPEVGASKPEGIDSRPETLHPGRPQPPAEEELCSGKPFDAFTDLKNGSLFAFRGQYCYELDEKAVRPGYPKLIRDVWGIEGPIDAAFTRINCQGKTYLFKGSQYWRFEDGVLDPDYPRNISDGFDGIPDNVDAALALPAHSYSGRERVYFFKGKQYWEYQFQHQPSQEECEGSSLSAVFEHFAMMQRDSWEDIFELLFWGRTSAGTRQPQFISRDWHGVPGQVDAAMAGRIYISGMAPRPSLAKKQRFRHRNRKGYRSQRGHSRGRNQNSRRPSRATWLSLFSSEESNLGANNYDDYRMDWLVPATCEPIQSVFFFSGDKYYRVNLRTRRVDTVDPPYPRSIAQYWLGCPAPGHL

SEQ ID NO: 103 - protein, 1247 aa, Homo sapiens
MLASSSRIRAAWTRALLLPLLLAGPVGCLSRQELFPFGPGQGDLELEDGDDFVSPALELSGALRFYDRSDIDAVYVTTNGIIATSEPPAKESHPGLFPPTFGAVAPFLADLDTTDGLGKVYYREDLSPSITQRAAECVHRGFPEISFQPSSAVVVTWESVAPYQGPSRDPDQKGKRNTFQAVLASSDSSSYAIFLYPEDGLQFHTTFSKKENNQVPAVVAFSQGSVGFLWKSNGAYNIFANDRESVENLAKSSNSGQQGVWVFEIGSPATTNGVVPADVILGTEDGAEYDDEDEDYDLATTRLGLEDVGTTPFSYKALRRGGADTYSVPSVLSPRRAATERPLGPPTERTRSFQLAVETFHQQHPQVIDVDEVEETGVVFSYNTDSRQTCANNRHQCSVHAECRDYATGFCCSCVAGYTGNGRQCVAEGSPQRVNGKVKGRIFVGSSQVPIVFENTDLHSYVVMNHGRSYTAISTIPETVGYSLLPLAPVGGIIGWMFAVEQDGFKNGFSITGGEFTRQAEVTFVGHPGNLVIKQRFSGIDEHGHLTIDTELEGRVPQIPFGSSVHIEPYTELYHYSTSVITSSSTREYTVTEPERDGASPSRIYTYQWRQTITFQECVHDDSRPALPSTQQLSVDSVFVLYNQEEKILRYALSNSIGPVREGSPDALQNPCYIGTHGCDTNAACRPGPRTQFTCECSIGFRGDGRTCYDIDECSEQPSVCGSHTICNNHPGTFRCECVEGYQFSDEGTCVAVVDQRPINYCETGLHNCDIPQRAQCIYTGGSSYTCSCLPGFSGDGQACQDVDECQPSRCHPDAFCYNTPGSFTCQCKPGYQGDGFRCVPGEVEKTRCQHEREHILGAAGATDPQRPIPPGLFVPECDAHGHYAPTQCHGSTGYCWCVDRDGREVEGTRTRPGMTPPCLSTVAPPIHQGPAVPTAVIPLPPGTHLLFAQTGKIERLPLEGNTMRKTEAKAFLHVPAKVIIGLAFDCVDKMVYWTDITEPSIGRASLHGGEPTTIIRQDLGSPEGIAVDHLGRNIFWTDSNLDRIEVAKLDGTQRRVLFETDLVNPRGIVTDSVRGNLYWTDWNRDNPKIETSYMDGTNRRILVQDDLGLPNGLTFDAFSSQLCWVDAGTNRAECLNPSQPSRRKALEGLQYPFAVTSYGKNLYFTDWKMNSVVALDLAISKETDAFQPHKQTRLYGITTALSQCPQGHNYCSVNNGGCTHLCLATPGSRTCRCPDNTLGVDCIEQK

SEQ ID NO: 104 - protein, 3075 aa, Homo sapiens
MRGGVLLVLLLCVAAQCRQRGLFPAILNLASNAHISTNATCGEKGPEMFCKLVEHVPGRPVRNPQCRICDGNSANPRERHPISHAIDGTNNWWQSPSIQNGREYHWVTITLDLRQVFQVAYVIIKAANAPRPGNWILERSLDGTTFSPWQYYAVSDSECLSRYNITPRRGPPTYRADDEVICTSYYSRLVPLEHGEIHTSLINGRPSADDLSPKLLEFTSARYIRLRLQRIRTLNADLMTLSHREPKELDPIVTRRYYYSIKDISVGGMCICYGHASSCPWDETTKKLQCQCEHNTCGESCNRCCPGYHQQPWRPGTVSSGNTCEACNCHNKAKDCYYDESVAKQKKSLNTAGQFRGGGVCINCLQNTMGINCETCIDGYYRPHKVSPYEDEPCRPCNCDPVGSLSSVCIKDDLHSDLHNGKQPGQCPCKEGYTGEKCDRCQLGYKDYPTCVSCGCNPVGSASDEPCTGPCVCKENVEGKACDRCKPGFYNLKEKNPRGCSECFCFGVSDVCSSLSWPVGQVNSMSGWLVTDLISPRKIPSQQDALGGRHQVSINNTAVMQRLAPKYYWAAPEAYLGNKLTAFGGFLKYTVSYDIPVETVDSNLMSHADVIIKGNGLTLSTQAEGLSLQPYEEYLNVVRLVPENFQDFHSKRQIDRDQLMTVLANVTHLLIRANYNSAKMALYRLESVSLDIASSNAIDLVVAADVEHCECPQGYTGTSCESCLSGYYRVDGILFGGICQPCECHGHAAECNVHGVCIACAHNTTGVHCEQCLPGFYGEPSRGTPGDCQPCACPLTIASNNFSPTCHLNDGDEVVCDWCAPGYSGAWCERCADGYYGNPTVPGESCVPCDCSGNVDPSEAGHCDSVTGECLKCLGNTDGAHCERCADGFYGDAVTAKNCRACECHVKGSHSAVCHLETGLCDCKPNVTGQQCDQCLHGYYGLDSGHGCRPCNCSVAGSVSDGCTDEGQCHCVPGVAGKRCDRCAHGFYAYQDGSCTPCDCPHTQNTCDPETGECVCPPHTQGVKCEECEDGHWGYDAEVGCQACNCSLVGSTHHRCDVVTGHCQCKSKFGGRACDQCSLGYRDFPDCVPCDCDLRGTSGDACNLEQGLCGCVEETGACPCKENVFGPQCNECREGTFALRADNPLGCSPCFCSGLSHLCSELEDYVRTPVTLGSDQPLLRVVSQSNLRGTTEGVYYQAPDFLLDAATVRQHIRAEPFYWRLPQQFQGDQLMAYGGKLKYSVAFYSLDGVGTSNFEPQVLIKGGRIRKQVIYMDAPAPENGVRQEQEVAMRENFWKYFNSVSEKPVTREDFMSVLSDIEYILIKASYGQGLQQSRISDISMEVGRKAEKLHPEEEVASLLENCVCPPGTVGFSCQDCAPGYHRGKLPAGSDRGPRPLVAPCVPCSCNNHSDTCDPNTGKCLNCGDNTAGDHCDVCTSGYYGKVTGSASDCALCACPHSPPASFSPTCVLEGDHDFRCDACLLGYEGKHCERCSSSYYGNPQTPGGSCQKCDCNPHGSVHGDCDRTSGQCVCRLGASGLRCDECEPRHILMETDCVSCDDECVGVLLNDLDEIGDAVLSLNLTGIIPVPYGILSNLENTTKYLQESLLKENMQKDLGKIKLEGVAEETDNLQKKLTRMLASTQKVNRATERIFKESQDLAIAIERLQMSITEIMEKTTLNQTLDEDFLLPNSTLQNMQQNGTSLLEIMQIRDFTQLHQNATLELKAAEDLLSQIQENYQKPLEELEVLKEAASHVLSKHNNELKAAEALVREAEAKMQESNHLLLMVNANLREFSDKKLHVQEEQNLTSELIVQGRGLIDAAAAQTDAVQDALEHLEDHQDKLLLWSAKIRHHIDDLVMHMSQRNAVDLVYRAEDHAAEFQRLADVLYSGLENIRNVSLNATSAAYVHYNIQSLIEESEELARDAHRTVTETSLLSESLVSNGKAAVQRSSRFLKEGNNLSRKLPGIALELSELRNKTNRFQENAVEITRQTNESLLILRAIPKGIRDKGAKTKELATSASQSAVSTLRDVAGLSQELLNTSASLSRVNTTLRETHQLLQDSTMATLLAGRKVKDVEIQANLLFDRLKPLKMLEENLSRNLSEIKLLISQARKQAASIKVAVSADRDCIRAYQPQISSTNYNTLTLNVKTQEPDNLLFYLGSSTASDFLAVEMRRGRVAFLWDLGSGSTRLEFPDFPIDDNRWHSIHVARFGNIGSLSVKEMSSNQKSPTKTSKSPGTANVLDVNNSTLMFVGGLGGQIKKSPAVKVTHFKGCLGEAFLNGKSIGLWNYIEREGKCRGCFGSSQNEDPSFHFDGSGYSVVEKSLPATVTQIIMLFNTFSPNGLLLYLGSYGTKDFLSIELFRGRVKVMTDLGSGPITLLTDRRYNNGTWYKIAFQRNRKQGVLAVIDAYNTSNKETKQGETPGASSDLNRLDKDPIYVGGLPRSRVVRRGVTTKSFVGCIKNLEISRSTFDLLRNSYGVRKGCLLEPIRSVSFLKGGYIELPPKSLSPESEWLVTFATTNSSGIILAALGGDVEKRGDREEAHVPFFSVMLIGGNIEVHVNPGDGTGLRKALLHAPTGTCSDGQAHSISLVRNRRIITVQLDENNPVEMKLGTLVESRTINVSNLYVGGIPEGEGTSLLTMRRSFHGCIKNLIFNLELLDFNSAVGHEQVDLDTCWLSERPKLAPDAEDSKLLPEPRAFPEQCVVDAALEYVPGAHQFGLTQNSHFILPFNQSAVRKKLSVELSIRTFASSGLIYYMAHQNQADYAVLQLHGGRLHFMFDLGKGRTKVSHPALLSDGKWHTVKTDYVKRKGFITVDGRESPMVTVVGDGTMLDVEGLFYLGGLPSQYQARKIGNITHSIPACIGDVTVNSKQLDKDSPVSAFTVNRCYAVAQEGTYFDGSGYAALVKEGYKVQSDVNITLEFRTSSQNGVLLGISTAKVDAIGLELVDGKVLFHVNNGAGRITAAYEPKTATVLCDGKWHTLQANKSKHRITLIVDGNAVGAESPHTQSTSVDTNNPIYVGGYPAGVKQKCLRSQTSFRGCLRKLALIKSPQVQSFDFSRAFELHGVFLHSCPGTES

SEQ ID NO: 105 - protein, 158 aa, Homo sapiens
MGKISSLPTQLFKCCFCDFLKVKMHTMSSSHLFYLALCLLTFTSSATAGPETLCGAELVDALQFVCGDRGFYFNKPTGYGSSSRRAPQTGIVDECCFRSCDLRRLEMYCAPLKPAKSARSVRAQRHTDMPKTQKYQPPSTNKNTKSQRRKGSTFEERK

SEQ ID NO: 106 - protein, 155 aa, Homo sapiens
MAEGEITTFTALTEKFNLPPGNYKKPKLLYCSNGGHFLRILPDGTVDGTRDRSDQHIQLQLSAESVGEVYIKSTETGQYLAMDTDGLLYGSQTPNEECLFLERLEENHYNTYISKKHAEKNWFVGLKKNGSCKRGPRTHYGQKAILFLPLPVSSD

SEQ ID NO: 107 - protein, 288 aa, Homo sapiens
MVGVGGGDVEDVTPRPGGCQISGRGARGCNGIPGAAAWEAALPRRRPRRHPSVNPRSRAAGSPRTRGRRTEERPSGSRLGDRGRGRALPGGRLGGRGRGRAPERVGGRGRGRGTAAPRAAPAARGSRPGPAGTMAAGSITTLPALPEDGGSGAFPPGHFKDPKRLYCKNGGFFLRIHPDGRVDGVREKSDPHIKLQLQAEERGVVSIKGVCANRYLAMKEDGRLLASKCVTDECFFFERLESNNYNTYRSRKYTSWYVALKRTGQYKLGSKTGPGQKAILFLPMSAKS

SEQ ID NO: 108 - protein, 390 aa, Homo sapiens
MPPSGLRLLPLLLPLLWLLVLTPGRPAAGLSTCKTIDMELVKRKRIEAIRGQILSKLRLASPPSQGEVPPGPLPEAVLALYNSTRDRVAGESAEPEPEPEADYYAKEVTRVLMVETHNEIYDKFKQSTHSIYMFFNTSELREAVPEPVLLSRAELRLLRLKLKVEQHVELYQKYSNNSWRYLSNRLLAPSDSPEWLSFDVTGVVRQWLSRGGEIEGFRLSAHCSCDSRDNTLQVDINGFTTGRRGDLATIHGMNRPFLLLMATPLERAQHLQSSRHRRALDTNYCFSSTEKNCCVRQLYIDFRKDLGWKWIHEPKGYHANFCLGPCPYIWSLDTQYSKVLALYNQHNPGASAAPCCVPQALEPLPIVYYVGRKPKVEQLSNMIVRSCKCS

SEQ ID NO: 109 - protein, 442 aa, Homo sapiens
MHYCVLSAFLILHLVTVALSLSTCSTLDMDQFMRKRIEAIRGQILSKLKLTSPPEDYPEPEEVPPEVISIYNSTRDLLQEKASRRAAACERERSDEEYYAKEVYKIDMPPFFPSETVCPVVTTPSGSVGSLCSRQSQVLCGYLDAIPPTFYRPYFRIVRFDVSAMEKNASNLVKAEFRVFRLQNPKARVPEQRIELYQILKSKDLTSPTQRYIDSKVVKTRAEGEWLSFDVTDAVHEWLHHKDRNLGFKISLHCPCCTFVPSNNYIIPNKSEELEARFAGIDGTSTYTSGDQKTIKSTRKKNSGKTPHLLLMLLPSYRLESQQTNRRKKRALDAAYCFRNVQDNCCLRPLYIDFKRDLGWKWIHEPKGYNANFCAGACPYLWSSDTQHSRVLSLYNTINPEASASPCCVSQDLEPLTILYYIGKTPKIEQLSNMIVKSCKCS

SEQ ID NO: 110 - protein, 414 aa, Homo sapiens
MHYCVLSAFLILHLVTVALSLSTCSTLDMDQFMRKRIEAIRGQILSKLKLTSPPEDYPEPEEVPPEVISIYNSTRDLLQEKASRRAAACERERSDEEYYAKEVYKIDMPPFFPSENAIPPTFYRPYFRIVRFDVSAMEKNASNLVKAEFRVFRLQNPKARVPEQRIELYQILKSKDLTSPTQRYIDSKVVKTRAEGEWLSFDVTDAVHEWLHHKDRNLGFKISLHCPCCTFVPSNNYIIPNKSEELEARFAGIDGTSTYTSGDQKTIKSTRKKNSGKTPHLLLMLLPSYRLESQQTNRRKKRALDAAYCFRNVQDNCCLRPLYIDFKRDLGWKWIHEPKGYNANFCAGACPYLWSSDTQHSRVLSLYNTINPEASASPCCVSQDLEPLTILYYIGKTPKIEQLSNMIVKSCKCS

SEQ ID NO: 111 - protein, 377 aa, Homo sapiens
MCDEDETTALVCDNGSGLVKAGFAGDDAPRAVFPSIVGRPRHQGVMVGMGQKDSYVGDEAQSKRGILTLKYPIEHGIITNWDDMEKIWHHTFYNELRVAPEEHPTLLTEAPLNPKANREKMTQIMFETFNVPAMYVAIQAVLSLYASGRTTGIVLDSGDGVTHNVPIYEGYALPHAIMRLDLAGRDLTDYLMKILTERGYSFVTTAEREIVRDIKEKLCYVALDFENEMATAASSSSLEKSYELPDGQVITIGNERFRCPETLFQPSFIGMESAGIHETTYNSIMKCDIDIRKDLYANNVMSGGTTMYPGIADRMQKEITALAPSTMKIKIIAPPERKYSVWIGGSILASLSTFQQMWITKQEYDEAGPSIVHRKCF

SEQ ID NO: 112 - protein, 377 aa, Homo sapiens
MCEEEDSTALVCDNGSGLCKAGFAGDDAPRAVFPSIVGRPRHQGVMVGMGQKDSYVGDEAQSKRGILTLKYPIEHGIITNWDDMEKIWHHSFYNELRVAPEEHPTLLTEAPLNPKANREKMTQIMFETFNVPAMYVAIQAVLSLYASGRTTGIVLDSGDGVTHNVPIYEGYALPHAIMRLDLAGRDLTDYLMKILTERGYSFVTTAEREIVRDIKEKLCYVALDFENEMATAASSSSLEKSYELPDGQVITIGNERFRCPETLFQPSFIGMESAGIHETTYNSIMKCDIDIRKDLYANNVLSGGTTMYPGIADRMQKEITALAPSTMKIKIIAPPERKYSVWIGGSILASLSTFQQMWISKQEYDEAGPSIVHRKCF

SEQ ID NO: 113 - protein, 375 aa, Homo sapiens
MDDDIAALVVDNGSGMCKAGFAGDDAPRAVFPSIVGRPRHQGVMVGMGQKDSYVGDEAQSKRGILTLKYPIEHGIVTNWDDMEKIWHHTFYNELRVAPEEHPVLLTEAPLNPKANREKMTQIMFETFNTPAMYVAIQAVLSLYASGRTTGIVMDSGDGVTHTVPIYEGYALPHAILRLDLAGRDLTDYLMKILTERGYSFTTTAEREIVRDIKEKLCYVALDFEQEMATAASSSSLEKSYELPDGQVITIGNERFRCPEALFQPSFLGMESCGIHETTFNSIMKCDVDIRKDLYANTVLSGGTTMYPGIADRMQKEITALAPSTMKIKIIAPPERKYSVWIGGSILASLSTFQQMWISKQEYDESGPSIVHRKCF

SEQ ID NO: 114 - protein, 377 aa, Homo sapiens
MCDDEETTALVCDNGSGLVKAGFAGDDAPRAVFPSIVGRPRHQGVMVGMGQKDSYVGDEAQSKRGILTLKYPIEHGIITNWDDMEKIWHHTFYNELRVAPEEHPTLLTEAPLNPKANREKMTQIMFETFNVPAMYVAIQAVLSLYASGRTTGIVLDSGDGVTHNVPIYEGYALPHAIMRLDLAGRDLTDYLMKILTERGYSFVTTAEREIVRDIKEKLCYVALDFENEMATAASSSSLEKSYELPDGQVITIGNERFRCPETLFQPSFIGMESAGIHETTYNSIMKCDIDIRKDLYANNVLSGGTTMYPGIADRMQKEITALAPSTMKIKIIAPPERKYSVWIGGSILASLSTFQQMWISKQEYDEAGPSIVHRKCF

SEQ ID NO: 115 - protein, 375 aa, Homo sapiens
MEEEIAALVIDNGSGMCKAGFAGDDAPRAVFPSIVGRPRHQGVMVGMGQKDSYVGDEAQSKRGILTLKYPIEHGIVTNWDDMEKIWHHTFYNELRVAPEEHPVLLTEAPLNPKANREKMTQIMFETFNTPAMYVAIQAVLSLYASGRTTGIVMDSGDGVTHTVPIYEGYALPHAILRLDLAGRDLTDYLMKILTERGYSFTTTAEREIVRDIKEKLCYVALDFEQEMATAASSSSLEKSYELPDGQVITIGNERFRCPEALFQPSFLGMESCGIHETTFNSIMKCDVDIRKDLYANTVLSGGTTMYPGIADRMQKEITALAPSTMKIKIIAPPERKYSVWIGGSILASLSTFQQMWISKQEYDESGPSIVHRKCF

SEQ ID NO: 116 - protein, 376 aa, Homo sapiens
MCEEETTALVCDNGSGLCKAGFAGDDAPRAVFPSIVGRPRHQGVMVGMGQKDSYVGDEAQSKRGILTLKYPIEHGIITNWDDMEKIWHHSFYNELRVAPEEHPTLLTEAPLNPKANREKMTQIMFETFNVPAMYVAIQAVLSLYASGRTTGIVLDSGDGVTHNVPIYEGYALPHAIMRLDLAGRDLTDYLMKILTERGYSFVTTAEREIVRDIKEKLCYVALDFENEMATAASSSSLEKSYELPDGQVITIGNERFRCPETLFQPSFIGMESAGIHETTYNSIMKCDIDIRKDLYANNVLSGGTTMYPGIADRMQKEITALAPSTMKIKIIAPPERKYSVWIGGSILASLSTFQQMWISKPEYDEAGPSIVHRKCF

SEQ ID NO: 117 - protein, 333 aa, Homo sapiens
MCEEETTALVCDNGSGLCKAGFAGDDAPRAVFPSIVGRPRHQIWHHSFYNELRVAPEEHPTLLTEAPLNPKANREKMTQIMFETFNVPAMYVAIQAVLSLYASGRTTGIVLDSGDGVTHNVPIYEGYALPHAIMRLDLAGRDLTDYLMKILTERGYSFVTTAEREIVRDIKEKLCYVALDFENEMATAASSSSLEKSYELPDGQVITIGNERFRCPETLFQPSFIGMESAGIHETTYNSIMKCDIDIRKDLYANNVLSGGTTMYPGIADRMQKEITALAPSTMKIKIIAPPERKYSVWIGGSILASLSTFQQMWISKPEYDEAGPSIVHRKCF

SEQ ID NO: 118 - protein, 207 aa, Homo sapiens
MAGPATQSPMKLMALQLLLWHSALWTVQEATPLGPASSLPQSFLLKCLEQVRKIQGDGAALQEKLVSECATYKLCHPEELVLLGHSLGIPWAPLSSCPSQALQLAGCLSQLHSGLFLYQGLLQALEGISPELGPTLDTLQLDVADFATTIWQQMEELGMAPALQPTQGAMPAFASAFQRRAGGVLVASHLQSFLEVSYRVLRHLAQP

SEQ ID NO: 119 - protein, 204 aa, Homo sapiens
MAGPATQSPMKLMALQLLLWHSALWTVQEATPLGPASSLPQSFLLKCLEQVRKIQGDGAALQEKLCATYKLCHPEELVLLGHSLGIPWAPLSSCPSQALQLAGCLSQLHSGLFLYQGLLQALEGISPELGPTLDTLQLDVADFATTIWQQMEELGMAPALQPTQGAMPAFASAFQRRAGGVLVASHLQSFLEVSYRVLRHLAQP

SEQ ID NO: 120 - protein, 171 aa, Homo sapiens
MAGPATQSPMKLMALQLLLWHSALWTVQEATPLGPASSLPQSFLLKCLEQVRKIQGDGAALQEKLVSEAGCLSQLHSGLFLYQGLLQALEGISPELGPTLDTLQLDVADFATTIWQQMEELGMAPALQPTQGAMPAFASAFQRRAGGVLVASHLQSFLEVSYRVLRHLAQP

SEQ ID NO: 121 - protein, 168 aa, Homo sapiens
MAGPATQSPMKLMALQLLLWHSALWTVQEATPLGPASSLPQSFLLKCLEQVRKIQGDGAALQEKLAGCLSQLHSGLFLYQGLLQALEGISPELGPTLDTLQLDVADFATTIWQQMEELGMAPALQPTQGAMPAFASAFQRRAGGVLVASHLQSFLEVSYRVLRHLAQP

SEQ ID NO: 122 - protein, 211 aa, Homo sapiens [sequence omitted]

SEQ ID NO: 123 - protein, 196 aa, Homo sapiens
MRTLACLLLLGCGYLAHVLAEEAEIPREVIERLARSQIHSIRDLQRLLEIDSVGSEDSLDTSLRAHGVHATKHVPEKRPLPIRRKRSIEEAVPAVCKTRTVIYEIPRSQVDPTSANFLIWPPCVEVKRCTGCCNTSSVKCQPSRVHHRSVKVAKVEYVRKKPKLKEVQVRLEEHLECACATTSLNPDYREEDTDVR

SEQ ID NO: 124 - protein, 241 aa, Homo sapiens
MNRCWALFLSLCCYLRLVSAEGDPIPEELYEMLSDHSIRSFDDLQRLLHGDPGEEDGAELDLNMTRSHSGGELESLARGRRSLGSLTIAEPAMIAECKTRTEVFEISRRLIDRTNANFLVWPPCVEVQRCSGCCNNRNVQCRPTQVQLRPVQVRKIEIVRKKPIFKKATVTLEDHLACKCETVAAARPVTRSPGGSQEQRAKTPQTRVTIRTVRVRRPPKGKHRKFKHTHDKTALKETLGA

SEQ ID NO: 125 - protein, 226 aa, Homo sapiens
MFIMGLGDPIPEELYEMLSDHSIRSFDDLQRLLHGDPGEEDGAELDLNMTRSHSGGELESLARGRRSLGSLTIAEPAMIAECKTRTEVFEISRRLIDRTNANFLVWPPCVEVQRCSGCCNNRNVQCRPTQVQLRPVQVRKIEIVRKKPIFKKATVTLEDHLACKCETVAAARPVTRSPGGSQEQRAKTPQTRVTIRTVRVRRPPKGKHRKFKHTHDKTALKETLGA

SEQ ID NO: 126 - protein, 345 aa, Homo sapiens
MSLFGLLLLTSALAGQRQGTQAESNLSSKFQFSSNKEQNGVQDPQHERIITVSTNGSIHSPRFPHTYPRNTVLVWRLVAVEENVWIQLTFDERFGLEDPEDDICKYDFVEVEEPSDGTILGRWCGSGTVPGKQISKGNQIRIRFVSDEYFPSEPGFCIHYNIVMPQFTEAVSPSVLPPSALPLDLLNNAITAFSTLEDLIRYLEPERWQLDLEDLYRPTWQLLGKAFVFGRKSRVVDLNLLTEEVRLYSCTPRNFSVSIREELKRTDTIFWPGCLLVKRCGGNCACCLHNCNECQCVPSKVTKKYHEVLQLRPKTGVRGLHKSLTDVALEHHEECDCVCRGSTGG

SEQ ID NO: 127 - protein, 370 aa, Homo sapiens
MHRLIFVYTLICANFCSCRDTSATPQSASIKALRNANLRRDESNHLTDLYRRDETIQVKGNGYVQSPRFPNSYPRNLLLTWRLHSQENTRIQLVFDNQFGLEEAENDICRYDFVEVEDISETSTIIRGRWCGHKEVPPRIKSRTNQIKITFKSDDYFVAKPGFKIYYSLLEDFQPAAASETNWESVTSSISGVSYNSPSVTDPTLIADALDKKIAEFDTVEDLLKYFNPESWQEDLENMYLDTPRYRGRSYHDRKSKVDLDRLNDDAKRYSCTPRNYSVNIREELKLANVVFFPRCLLVQRCGGNCGCGTVNWRSCTCNSGKTVKKYHEVLQFEPGHIKRRGRAKTMALVDIQLDHHERCDCICSSRPPR

SEQ ID NO: 128 - protein, 364 aa, Homo sapiens
MHRLIFVYTLICANFCSCRDTSATPQSASIKALRNANLRRDDLYRRDETIQVKGNGYVQSPRFPNSYPRNLLLTWRLHSQENTRIQLVFDNQFGLEEAENDICRYDFVEVEDISETSTIIRGRWCGHKEVPPRIKSRTNQIKITFKSDDYFVAKPGFKIYYSLLEDFQPAAASETNWESVTSSISGVSYNSPSVTDPTLIADALDKKIAEFDTVEDLLKYFNPESWQEDLENMYLDTPRYRGRSYHDRKSKVDLDRLNDDAKRYSCTPRNYSVNIREELKLANVVFFPRCLLVQRCGGNCGCGTVNWRSCTCNSGKTVKKYHEVLQFEPGHIKRRGRAKTMALVDIQLDHHERCDCICSSRPPR

SEQ ID NO: 129 - protein, 469 aa, Homo sapiens
MHSFPPLLLLLFWGVVSHSFPATLETQEQDVDLVQKYLEKYYNLKNDGRQVEKRRNSGPVVEKLKQMQEFFGLKVTGKPDAETLKVMKQPRCGVPDVAQFVLTEGNPRWEQTHLTYRIENYTPDLPRADVDHAIEKAFQLWSNVTPLTFTKVSEGQADIMISFVRGDHRDNSPFDGPGGNLAHAFQPGPGIGGDAHFDEDERWTNNFREYNLHRVAAHELGHSLGLSHSTDIGALMYPSYTFSGDVQLAQDDIDGIQAIYGRSQNPVQPIGPQTPKACDSKLTFDAITTIRGEVMFFKDRFYMRTNPFYPEVELNFISVFWPQLPNGLEAAYEFADRDEVRFFKGNKYWAVQGQNVLHGYPKDIYSSFGFPRTVKHIDAALSEENTGKTYFFVANKYWRYDEYKRSMDPGYPKMIAHDFPGIGHKVDAVFMKDGFFYFFHGTRQYKFDPKTKRILTLQKANSWFNCRKN

SEQ ID NO: 130 - protein, 403 aa, Homo sapiens
MQEFFGLKVTGKPDAETLKVMKQPRCGVPDVAQFVLTEGNPRWEQTHLTYRIENYTPDLPRADVDHAIEKAFQLWSNVTPLTFTKVSEGQADIMISFVRGDHRDNSPFDGPGGNLAHAFQPGPGIGGDAHFDEDERWTNNFREYNLHRVAAHELGHSLGLSHSTDIGALMYPSYTFSGDVQLAQDDIDGIQAIYGRSQNPVQPIGPQTPKACDSKLTFDAITTIRGEVMFFKDRFYMRTNPFYPEVELNFISVFWPQLPNGLEAAYEFADRDEVRFFKGNKYWAVQGQNVLHGYPKDIYSSFGFPRTVKHIDAALSEENTGKTYFFVANKYWRYDEYKRSMDPGYPKMIAHDFPGIGHKVDAVFMKDGFFYFFHGTRQYKFDPKTKRILTLQKANSWFNCRKN

SEQ ID NO: 131 - protein, 467 aa, Homo sapiens [sequence omitted]

SEQ ID NO: 132 - protein, 476 aa, Homo sapiens
MMHLAFLVLLCLPVCSAYPLSGAAKEEDSNKDLAQQYLEKYYNLEKDVKQFRRKDSNLIVKKIQGMQKFLGLEVTGKLDTDTLEVMRKPRCGVPDVGHFSSFPGMPKWRKTHLTYRIVNYTPDLPRDAVDSAIEKALKVWEEVTPLTFSRLYEGEADIMISFAVKEHGDFYSFDGPGHSLAHAYPPGPGLYGDIHFDDDEKWTEDASGTNLFLVAAHELGHSLGLFHSANTEALMYPLYNSFTELAQFRLSQDDVNGIQSLYGPPPASTEEPLVPTKSVPSGSEMPAKCDPALSFDAISTLRGEYLFFKDRYFWRRSHWNPEPEFHLISAFWPSLPSYLDAAYEVNSRDTVFIFKGNEFWAIRGNEVQAGYPRGIHTLGFPPTIRKIDAAVSDKEKKKTYFFAADKYWRFDENSQSMEQGFPRLIADDFPGVEPKVDAVLQAFGFFYFFSGSSQFEFDPNARMVTHILKSNSWLHC

SEQ ID NO: 133 - protein, 470 aa, Homo sapiens
MKFLLILLLQATASGALPLNSSTSLEKNNVLFGERYLEKFYGLEINKLPVTKMKYSGNLMKEKIQEMQHFLGLKVTGQLDTSTLEMMHAPRCGVPDVHHFREMPGGPVWRKHYITYRINNYTPDMNREDVDYAIRKAFQVWSNVTPLKFSKINTGMADILVVFARGAHGDFHAFDGKGGILAHAFGPGSGIGGDAHFDEDEFWTTHSGGTNLFLTAVHEIGHSLGLGHSSDPKAVMFPTYKYVDINTFRLSADDIRGIQSLYGDPKENQRLPNPDNSEPALCDPNLSFDAVTTVGNKIFFFKDRFFWLKVSERPKTSVNLISSLWPTLPSGIEAAYEIEARNQVFLFKDDKYWLISNLRPEPNYPKSIHSFGFPNFVKKIDAAVFNPRFYRTYFFVDNQYWRYDERRQMMDPGYPKLITKNFQGIGPKIDAVFYSKNKYYYFFQGSNQFEYDFLLQRITKTLKSNSWFGC

SEQ ID NO: 134 - protein, 2871 aa, Homo sapiens
MRRGRLLEIALGFTVLLASYTSHGADANLEAGNVKETRASRAKRRGGGGHDALKGPNVCGSRYNAYCCPGWKTLPGGNQCIVPICRHSCGDGFCSRPNMCTCPSGQIAPSCGSRSIQHCNIRCMNGGSCSDDHCLCQKGYIGTHCGQPVCESGCLNGGRCVAPNRCACTYGFTGPQCERDYRTGPCFTVISNQMCQGQLSGIVCTKTLCCATVGRAWGHPCEMCPAQPHPCRRGFIPNIRTGACQDVDECQAIPGLCQGGNCINTVGSFECKCPAGHKLNEVSQKCEDIDECSTIPGICEGGECTNTVSSYFCKCPPGFYTSPDGTRCIDVRPGYCYTALTNGRCSNQLPQSITKMQCCCDAGRCWSPGVTVAPEMCPIRATEDFNKLCSVPMVIPGRPEYPPPPLGPIPPVLPVPPGFPPGPQIPVPRPPVEYLYPSREPPRVLPVNVTDYCQLVRYLCQNGRCIPTPGSYRCECNKGFQLDLRGECIDVDECEKNPCAGGECINNQGSYTCQCRAGYQSTLTRTECRDIDECLQNGRICNNGRCINTDGSFHCVCNAGFHVTRDGKNCEDMDECSIRNMCLNGMCINEDGSFKCICKPGFQLASDGRYCKDINECETPGICMNGRCVNTDGSYRCECFPGLAVGLDGRVCVDTHMRSTCYGGYKRGQCIKPLFGAVTKSECCCASTEYAFGEPCQPCPAQNSAEYQALCSSGPGMTSAGSDINECALDPDICPNGICENLRGTYKCICNSGYEVDSTGKNCVDINECVLNSLLCDNGQCRNTPGSFVCTCPKGFIYKPDLKTCEDIDECESSPCINGVCKNSPGSFICECSSESTLDPTKTICIETIKGTCWQTVIDGRCEININGATLKSQCCSSLGAAWGSPCTLCQVDPICGKGYSRIKGTQCEDIDECEVFPGVCKNGLCVNTRGSFKCQCPSGMTLDATGRICLDIRLETCFLRYEDEECTLPIAGRHRMDACCCSVGAAWGTEECEECPMRNTPEYEELCPRGPGFATKEITNGKPFFKDINECKMIPSLCTHGKCRNTIGSFKCRCDSGFALDSEERNCTDIDECRISPDLCGRGQCVNTPGDFECKCDEGYESGFMMMKNCMDIDECQRDPLLCRGGVCHNTEGSYRCECPPGHQLSPNISACIDINECELSAHLCPNGRCVNLIGKYQCACNPGYHSTPDRLFCVDIDECSIMNGGCETFCTNSEGSYECSCQPGFALMPDQRSCTDIDECEDNPNICDGGQCTNIPGEYRCLCYDGFMASEDMKTCVDVNECDLNPNICLSGTCENTKGSFICHCDMGYSGKKGKTGCTDINECEIGAHNCGKHAVCTNTAGSFKCSCSPGWIGDGIKCTDLDECSNGTHMCSQHADCKNTMGSYRCLCKEGYTGDGFTCTDLDECSENLNLCGNGQCLNAPGGYRCECDMGFVPSADGKACEDIDECSLPNICVFGTCHNLPGLFRCECEIGYELDRSGGNCTDVNECLDPTTCISGNCVNTPGSYICDCPPDFELNPTRVGCVDTRSGNCYLDIRPRGDNGDTACSNEIGVGVSKASCCCSLGKAWGTPCEMCPAVNTSEYKILCPGGEGFRPNPITVILEDIDECQELPGLCQGGKCINTFGSFQCRCPTGYYLNEDTRVCDDVNECETPGICGPGTCYNTVGNYTCICPPDYMQVNGGNNCMDMRRSLCYRNYYADNQTCDGELLFNMTKKMCCCSYNIGRAWNKPCEQCPIPSTDEFATLCGSQRPGFVIDIYTGLPVDIDECREIPGVCENGVCINMVGSFRCECPVGFFYNDKLLVCEDIDECQNGPVCQRNAECINTAGSYRCDCKPGYRFTSTGQCNDRNECQEIPNICSHGQCIDTVGSFYCLCHTGFKTNDDQTMCLDINECERDACGNGTCRNTIGSFNCRCNHGFILSHNNDCIDVDECASGNGNLCRNGQCINTVGSFQCQCNEGYEVAPDGRTCVDINECLLEPRKCAPGTCQNLDGSYRCICPPGYSLQNEKCEDIDECVEEPEICALGTCSNTEGSFKCLCPEGFSLSSSGRRCQDLRMSYCYAKFEGGKCSSPKSRNHSKQECCCALKGEGWGDPCELCPTEPDEAFRQICPYGSGIIVGPDDSAVDMDECKEPDVCKHGQCINTDGSYRCECPFGYILAGNECVDTDECSVGNPCGNGTCKNVIGGFECTCEEGFEPGPMMTCEDINECAQNPLLCAFRCVNTYGSYECKCPVGYVLREDRRMCKDEDECEEGKHDCTEKQMECKNLIGTYMCICGPGYQRRPDGEGCVDENECQTKPGICENGRCLNTRGSYTCECNDGFTASPNQDECLDNREGYCFTEVLQNMCQIGSSNRNPVTKSECCCDGGRGWGPHCEICPFQGTVAFKKLCPHGRGFMTNGADIDECKVIHDVCRNGECVNDRGSYHCICKTGYTPDITGTSCVDLNECNQAPKPCNFICKNTEGSYQCSCPKGYILQEDGRSCKDLDECATKQHNCQFLCVNTIGGFTCKCPPGFTQHHTSCIDNNECTSDINLCGSKGICQNTPGSFTCECQRGFSLDQTGSSCEDVDECEGNHRCQHGCQNIIGGYRCSCPQGYLQHYQWNQCVDENECLSAHICGGASCHNTLGSYKCMCPAGFQYEQFSGGCQDINECGSAQAPCSYGCSNTEGGYLCGCPPGYFRIGQGHCVSGMGMGRGNPEPPVSGEMDDNSLSPEACYECKINGYPKRGRKRRSTNETDASNIEDQSETEANVSLASWDVEKTAIFAFNISHVSNKVRILELLPALTTLTNHNRYLIESGNEDGFFKINQKEGISYLHFTKKKPVAGTYSLQISSTPLYKKKELNQLEDKYDKDYLSGELGDNLKMKIQVLLH

SEQ ID NO: 135 - protein, 2912 aa, Homo sapiens
MGRRRRLCLQLYFLWLGCVVLWAQGTAGQPQPPPPKPPRPQPPPQQVRSATAGSEGGFLAPEYREEGAAVASRVRRRGQQDVLRGPNVCGSRFHSYCCPGWKTLPGGNQCIVPICRNSCGDGFCSRPNMCTCSSGQISSTCGSKSIQQCSVRCMNGGTCADDHCQCQKGYIGTYCGQPVCENGCQNGGRCIGPNRCACVYGFTGPQCERDYRTGPCFTQVNNQMCQGQLTGIVCTKTLCCATIGRAWGHPCEMCPAQPQPCRRGFIPNIRTGACQDVDECQAIPGICQGGNCINTVGSFECRCPAGHKQSETTQKCEDIDECSIIPGICETGECSNTVGSYFCVCPRGYVTSTDGSRCIDQRTGMCFSGLVNGRCAQELPGRMTKMQCCCEPGRCWGIGTIPEACPVRGSEEYRRLCMDGLPMGGIPGSAGSRPGGTGGNGFAPSGNGNGYGPGGTGFIPIPGGNGFSPGVGGAGVGAGGQGPIITGLTILNQTIDICKHHANLCLNGRCIPTVSSYRCECNMGYKQDANGDCIDVDECTSNPCTNGDCVNTPGSYYCKCHAGFQRTPTKQACIDIDECIQNGVLCKNGRCVNTDGSFQCICNAGFELTTDGKNCVDHDECTTTNMCLNGMCINEDGSFKCICKPGFVLAPNGRYCTDVDECQTPGICMNGHCINSEGSFRCDCPPGLAVGMDGRVCVDTHMRSTCYGGIKKGVCVRPFPGAVTKSECCCANPDYGFGEPCQPCPAKNSAEFHGLCSSGVGITVDGRDINECALDPDICANGICENLRGSYRCNCNSGYEPDASGRNCIDIDECLVNRLLCDNGLCRNTPGSYSCTCPPGYVFRTETETCEDINECESNPCVNGACRNNLGSFNCECSPGSKLSSTGLICIDSLKGTCWLNIQDSRCEVNINGATLKSECCATLGAAWGSPCERCELDTACPRGLARIKGVTCEDVNECEVFPGVCPNGRCVNSKGSFHCECPEGLTLDGTGRVCLDIRMEQCYLKWDEDECIHPVPGKFRMDACCCAVGAAWGTECEECPKPGTKEYETLCPRGAGFANRGDVLTGRPFYKDINECKAFPGMCTYGKCRNTIGSFKCRCNSGFALDMEERNCTDIDECRISPDLCGSGICVNTPGSFECECFEGYESGFMMMKNCMDIDECERNPLLCRGGTCVNTEGSFQCDCPLGHELSPSREDCVDINECSLSDNLCRNGKCVNMIGTYQCSCNPGYQATPDRQGCTDIDECMIMNGGCDTQCTNSEGSYECSCSEGYALMPDGRSCADIDECENNPDICDGGQCTNIPGEYRCLCYDGFMASMDMKTCIDVNECDLNSNICMFGECENTKGSFICHCQLGYSVKKGTTGCTDVDECEIGAHNCDMHASCLNIPGSFKCSCREGWIGNGIKCIDLDECSNGTHQCSINAQCVNTPGSYRCACSEGFTGDGFTCSDVDECAENINLCENGQCLNVPGAYRCECEMGFTPASDSRSCQDIDECSFQNICVFGTCNNLPGMFHCICDDGYELDRTGGNCTDIDECADPINCVNGLCVNTPGRYECNCPPDFQLNPTGVGCVDNRVGNCYLKFGPRGDGSLSCNTEIGVGVSRSSCCCSLGKAWGNPCETCPPVNSTEYYTLCPGGEGFRPNPITIILEDIDECQELPGLCQGGNCINTFGSFQCECPQGYYLSEDTRICEDIDECFAHPGVCGPGTCYNTLGNYTCICPPEYMQVNGGHNCMDMRKSFCYRSYNGTTCENELPFNVTKRMCCCTYNVGKAWNKPCEPCPTPGTADFKTICGNIPGFTFDIHTGKAVDIDECKEIPGICANGVCINQIGSFRCECPTGFSYNDLLLVCEDIDECSNGDNLCQRNADCINSPGSYRCECAAGFKLSPNGACVDRNECLEIPNVCSHGLCVDLQGSYQCICHNGFKASQDQTMCMDVDECERHPCGNGTCKNTVGSYNCLCYPGFELTHNNDCLDIDECSSFFGQVCRNGRCFNEIGSFKCLCNEGYELTPDGKNCIDTNECVALPGSCSPGTCQNLEGSFRCICPPGYEVKSENCIDINECDEDPNICLFGSCTNTPGGFQCLCPPGFVLSDNGRRCFDTRQSFCFTNFENGKCSVPKAFNTTKAKCCCSKMPGEGWGDPCELCPKDDEVAFQDLCPYGHGTVPSLHDTREDVNECLESPGICSNGQCINTDGSFRCECPMGYNLDYTGVRCVDTDECSIGNPCGNGTCTNVIGSFECNCNEGFEPGPMMNCEDINECAQNPLLCAFRCMNTFGSYECTCPIGYALREDQKMCKDLDECAEGLHDCESRGMMCKNLIGTFMCICPPGMARRPDGEGCVDENECRTKPGICENGRCVNIIGSYRCECNEGFQSSSSGTECLDNRQGLCFAEVLQTICQMASSSRNLVTKSECCCDGGRGWGHQCELCPLPGTAQYKKICPHGPGYTTDGRDIDECKVMPNLCTNGQCINTMGSFRCFCKVGYTTDISGTSCIDLDECSQSPKPCNYICKNTEGSYQCSCPRGYVLQEDGKTCKDLDECQTKQHNCQFLCVNTLGGFTCKCPPGFTQHHTACIDNNECGSQPSLCGAKGICQNTPGSFSCECQRGFSLDATGLNCEDVDECDGNHRCQHGCQNILGGYRCGCPQGYIQHYQWNQCVDENECSNPNACGSASCYNTLGSYKCACPSGFSFDQFSSACHDVNECSSSKNPCNYGCSNTEGGYLCGCPPGYYRVGQGHCVSGMGFNKGQYLSLDTEVDEENALSPEACYECKINGYSKKDSRQKRSIHEPDPTAVEQISLESVDMDSPVNMKFNLSHLGSKEHILELRPAIQPLNNHIRYVISQGNDDSVFRIHQRNGLSYLHTAKKKLMPGTYTLEITSIPLYKKKELKKLEESNEDDYLLGELGEALRMRLQIQLY

SEQ ID NO: 136 - protein, 574 aa, Homo sapiens
MALARGSRQLGALVWGACLCVLVHGQQAQPGQGSDPARWRQLIQWENNGQVYSLLNSGSEYVPAGPQRSESSSRVLLAGAPQAQQRRSHGSPRRRQAPSLPLPGRVGSDTVRGQARHPFGFGQVPDNWREVAVGDSTGMARARTSVSQQRHGGSASSVSASAFASTYRQQPSYPQQFPYPQAPFVSQYENYDPASRTYDQGFVYYRPAGGGVGAGAAAVASAGVIYPYQPRARYEEYGGGEELPEYPPQGFYPAPERPYVPPPPPPPDGLDRRYSHSLYSEGTPGFEQAYPDPGPEAAQAHGGDPRLGWYPPYANPPPEAYGPPRALEPPYLPVRSSDTPPPGGERNGAQQGRLSVGSVYRPNQNGRGLPDLVPDPNYVQASTYVQRAHLYSLRCAAEEKCLASTAYAPEATDYDVRVLLRFPQRVKNQGTADFLPNRPRHTWEWHSCHQHYHSMDEFSHYDLLDAATGKKVAEGHKASFCLEDSTCDFGNLKRYACTSHTQGLSPGCYDTYNADIDCQWIDITDVQPGNYILKVHVNPKYIVLESDFTNNVVRCNIHYTGRYVSATNCKIVQS

SEQ ID NO: 137 - protein, 774 aa, Homo sapiens
MERPLCSHLCSCLAMLALLSPLSLAQYDSWPHYPEYFQQPAPEYHQPQAPANVAKIQLRLAGQKRKHSEGRVEVYYDGQWGTVCDDDFSIHAAHVVCRELGYVEAKSWTASSSYGKGEGPIWLDNLHCTGNEATLAACTSNGWGVTDCKHTEDVGVVCSDKRIPGFKFDNSLINQIENLNIQVEDIRIRAILSTYRKRTPVMEGYVEVKEGKTWKQICDKHWTAKNSRVVCGMFGFPGERTYNTKVYKMFASRRKQRYWPFSMDCTGTEAHISSCKLGPQVSLDPMKNVTCENGLPAVVSCVPGQVFSPDGPSRFRKAYKPEQPLVRLRGGAYIGEGRVEVLKNGEWGTVCDDKWDLVSASVVCRELGFGSAKEAVTGSRLGQGIGPIHLNEIQCTGNEKSIIDCKFNAESQGCNHEEDAGVRCNTPAMGLQKKLRLNGGRNPYEGRVEVLVERNGSLVWGMVCGQNWGIVEAMVVCRQLGLGFASNAFQETWYWHGDVNSNKVVMSGVKCSGTELSLAHCRHDGEDVACPQGGVQYGAGVACSETAPDLVLNAEMVQQTTYLEDRPMFMLQCAMEENCLSASAAQTDPTTGYRRLLRFSSQIHNNGQSDFRPKNGRHAWIWHDCHRHYHSMEVFTHYDLLNLNGTKVAEGHKASFCLEDTECEGDIQKNYECANFGDQGITMGCWDMYRHDIDCQWVDITDVPPGDYLFQVVINPNFEVAESDYSNNIMKCRSRYDGHRIWMYNCHIGGSFSEETEKKFEHFSGLLNNQLSPQ

SEQ ID NO: 138 - protein, 753 aa, Homo sapiens
MRPVSVWQWSPWGLLLCLLCSSCLGSPSPSTGPEKKAGSQGLRFRLAGFPRKPYEGRVEIQRAGEWGTICDDDFTLQAAHILCRELGFTEATGWTHSAKYGPGTGRIWLDNLSCSGTEQSVTECASRGWGNSDCTHDEDAGVICKDQRLPGFSDSNVIEVEHHLQVEEVRIRPAVGWGRRPLPVTEGLVEVRLPDGWSQVCDKGWSAHNSHVVCGMLGFPSEKRVNAAFYRLLAQRQQHSFGLHGVACVGTEAHLSLCSLEFYRANDTARCPGGGPAVVSCVPGPVYAASSGQKKQQQSKPQGEARVRLKGGAHPGEGRVEVLKASTWGTVCDRKWDLHAASVVCRELGFGSAREALSGARMGQGMGAIHLSEVRCSGQELSLWKCPHKNITAEDCSHSQDAGVRCNLPYTGAETRIRLSGGRSQHEGRVEVQIGGPGPLRWGLICGDDWGTLEAMVACRQLGLGYANHGLQETWYWDSGNITEVVMSGVRCTGTELSLDQCAHHGTHITCKRTGTRFTAGVICSETASDLLLHSALVQETAYIEDRPLHMLYCAAEENCLASSARSANWPYGHRRLLRFSSQIHNLGRADFRPKAGRHSWVWHECHGHYHSMDIFTHYDILTPNGTKVAEGHKASFCLEDTECQEDVSKRYECANFGEQGITVGCWDLYRHDIDCQWIDITDVKPGNYILQVVINPNFEVAESDFTNNAMKCNCKYDGHRIWVHNCHIGDAFSEEANRRFERYPGQTSNQII

SEQ ID NO: 139 - protein, 608 aa, Homo sapiens
MRPVSVWQWSPWGLLLCLLCSSCLGSPSPSTGPEKKAGSQGLRFRLAGFPRKPYEGRVEIQRAGEWGTICDDDFTLQAAHILCRELGFTEATGWTHSAKYGPGTGRIWLDNLSCSGTEQSVTECASRGWGNSDCTHDEDAGVICKDQRLPGFSDSNVIEARVRLKGGAHPGEGRVEVLKASTWGTVCDRKWDLHAASVVCRELGFGSAREALSGARMGQGMGAIHLSEVRCSGQELSLWKCPHKNITAEDCSHSQDAGVRCNLPYTGAETRIRLSGGRSQHEGRVEVQIGGPGPLRWGLICGDDWGTLEAMVACRQLGLGYANHGLQETWYWDSGNITEVVMSGVRCTGTELSLDQCAHHGTHITCKRTGTRFTAGVICSETASDLLLHSALVQETAYIEDRPLHMLYCAAEENCLASSARSANWPYGHRRLLRFSSQIHNLGRADFRPKAGRHSWVWHECHGHYHSMDIFTHYDILTPNGTKVAEGHKASFCLEDTECQEDVSKRYECANFGEQGITVGCWDLYRHDIDCQWIDITDVKPGNYILQVVINPNFEVAESDFTNNAMKCNCKYDGHRIWVHNCHIGDAFSEEANRRFERYPGQTSNQII

SEQ ID NO: 140 - protein, 392 aa, Homo sapiens
MGQGMGAIHLSEVRCSGQELSLWKCPHKNITAEDCSHSQDAGVRCNLPYTGAETRIRLSGGRSQHEGRVEVQIGGPGPLRWGLICGDDWGTLEAMVACRQLGLGYANHGLQETWYWDSGNITEVVMSGVRCTGTELSLDQCAHHGTHITCKRTGTRFTAGVICSETASDLLLHSALVQETAYIEDRPLHMLYCAAEENCLASSARSANWPYGHRRLLRFSSQIHNLGRADFRPKAGRHSWVWHECHGHYHSMDIFTHYDILTPNGTKVAEGHKASFCLEDTECQEDVSKRYECANFGEQGITVGCWDLYRHDIDCQWIDITDVKPGNYILQVVINPNFEVAESDFTNNAMKCNCKYDGHRIWVHNCHIGDAFSEEANRRFERYPGQTSNQII

SEQ ID NO: 141 - protein, 756 aa, Homo sapiens
MAWSPPATLFLFLLLLGQPPPSRPQSLGTTKLRLVGPESKPEEGRLEVLHQGQWGTVCDDNFAIQEATVACRQLGFEAALTWAHSAKYGQGEGPIWLDNVRCVGTESSLDQCGSNGWGVSDCSHSEDVGVICHPRRHRGYLSETVSNALGPQGRRLEEVRLKPILASAKQHSPVTEGAVEVKYEGHWRQVCDQGWTMNNSRVVCGMLGFPSEVPVDSHYYRKVWDLKMRDPKSRLKSLTNKNSFWIHQVTCLGTEPHMANCQVQVAPARGKLRPACPGGMHAVVSCVAGPHFRPPKTKPQRKGSWAEEPRVRLRSGAQVGEGRVEVLMNRQWGTVCDHRWNLISASVVCRQLGFGSAREALFGARLGQGLGPIHLSEVRCRGYERTLSDCPALEGSQNGCQHENDAAVRCNVPNMGFQNQVRLAGGRIPEEGLLEVQVEVNGVPRWGSVCSENWGLTEAMVACRQLGLGFAIHAYKETWFWSGTPRAQEVVMSGVRCSGTELALQQCQRHGPVHCSHGGGRFLAGVSCMDSAPDLVMNAQLVQETAYLEDRPLSQLYCAHEENCLSKSADHMDWPYGYRRLLRFSTQIYNLGRTDFRPKTGRDSWVWHQCHRHYHSIEVFTHYDLLTLNGSKVAEGHKASFCLEDTNCPTGLQRRYACANFGEQGVTVGCWDTYRHDIDCQWVDITDVGPGNYIFQVIVNPHYEVAESDFSNNMLQCRCKYDGHRVWLHNCHTGNSYPANAELSLEQEQRLRNNLI

SEQ ID NO: 142 - protein, 183 aa, Homo sapiens
MRAAYLFLLFLPAGLLAQGQYDLDPLPPFPDHVQYTHYSDQIDNPDYYDYQEVTPRPSEEQFQFQSQQQVQQEVIPAPTPEPGNAELEPTEPGPLDCREEQYPCTRLYSIHRPCKQCLNEVCFYSLRRVYVINKEICVRTVCAHEELLRADLCRDKFSKCGVMASSGLCQSVAASCARSCGSC

SEQ ID NO: 143 - protein, 182 aa, Homo sapiens
MRAAYLFLLFLPGLLAQGQYDLDPLPPFPDHVQYTHYSDQIDNPDYYDYQEVTPRPSEEQFQFQSQQQVQQEVIPAPTPEPGNAELEPTEPGPLDCREEQYPCTRLYSIHRPCKQCLNEVCFYSLRRVYVINKEICVRTVCAHEELLRADLCRDKFSKCGVMASSGLCQSVAASCARSCGSC

SEQ ID NO: 144 - protein, 173 aa, Homo sapiens
MSLLGPKVLLFLAAFIITSDWIPLGVNSQRGDDVTQATPETFTEDPNLVNDPATDETVLAVLADIAPSTDDLASLSEKNTTAECWDEKFTCTRLYSVHRPVKQCIHQLCFTSLRRMYIVNKEICSRLVCKEHEAMKDELCRQMAGLPPRRLRRSNYFRLPPCENVDLQRPNGL

SEQ ID NO: 145 - protein, 824 aa, Homo sapiens
MRQSLLFLTSVVPFVLAPRPPDDPGFGPHQRLEKLDSLLSDYDILSLSNIQQHSVRKRDLQTSTHVETLLTFSALKRHFKLYLTSSTERFSQNFKVVVVDGKNESEYTVKWQDFFTGHVVGEPDSRVLAHIRDDDVIIRINTDGAEYNIEPLWRFVNDTKDKRMLVYKSEDIKNVSRLQSPKVCGYLKVDNEELLPKGLVDREPPEELVHRVKRRADPDPMKNTCKLLVVADHRFYRYMGRGEESTTTNYLIELIDRVDDIYRNTSWDNAGFKGYGIQIEQIRILKSPQEVKPGEKHYNMAKSYPNEEKDAWDVKMLLEQFSFDIAEEASKVCLAHLFTYQDFDMGTLGLAYVGSPRANSHGGVCPKAYYSPVGKKNIYLNSGLTSTKNYGKTILTKEADLVTTHELGHNFGAEHDPDGLAECAPNEDQGGKYVMYPIAVSGDHENNKMFSNCSKQSIYKTIESKAQECFQERSNKVCGNSRVDEGEECDPGIMYLNNDTCCNSDCTLKEGVQCSDRNSPCCKNCQFETAQKKCQEAINATCKGVSYCTGNSSECPPPGNAEDDTVCLDLGKCKDGKCIPFCEREQQLESCACNETDNSCKVCCRDLSGRCVPYVDAEQKNLFLRKGKPCTVGFCDMNGKCEKRVQDVIERFWDFIDQLSINTFGKFLADNIVGSVLVFSLIFWIPFSILVHCVDKKLDKQYESLSLFHPSNVEMLSSMDSASVRIIKPFPAPQTPGRLQPAPVIPSAPAAPKLDHQRMDTIQEDPSTDSHMDEDGFEKDPFPNSSTAAKSFEDLTDHPVTRSEKAASFKLQRQNRVDSKETEC

SEQ ID NO: 146 - protein, 824 aa, Homo sapiens; identical to SEQ ID NO: 145

SEQ ID NO: 147 - protein, 713 aa, Homo sapiens
MATGQDRVVALVDMDCFFVQVEQRQNPHLRNKPCAVVQYKSWKGGGIIAVSYEARAFGVTRSMWADDAKKLCPDLLLAQVRESRGKANLTKYREASVEVMEIMSRFAVIERASIDEAYVDLTSAVQERLQKLQGQPISADLLPSTYIEGLPQGPTTAEETVQKEGMRKQGLFQWLDSLQIDNLTSPDLQLTVGAVIVEEMRAAIERETGFQCSAGISHNKVLAKLACGLNKPNRQTLVSHGSVPQLFSQMPIRKIRSLGGKLGASVIEILGIEYMGELTQFTESQLQSHFGEKNGSWLYAMCRGIEHDPVKPRQLPKTIGCSKNFPGKTALATREQVQWWLLQLAQELEERLTKDRNDNDRVATQLVVSIRVQGDKRLSSLRRCCALTRYDAHKMSHDAFTVIKNCNTSGIQTEWSPPLTMLFLCATKFSASAPSSSTDITSFLSSDPSSLPKVPVTSSEAKTQGSGPAVTATKKATTSLESFFQKAAERQKVKEASLSSLTAPTQAPMSNSPSKPSLPFQTSQSTGTEPFFKQKSLLLKQKQLNNSSVSSPQQNPWSNCKALPNSLPTEYPGCVPVCEGVSKLEESSKATPAEMDLAHNSQSMHASSASKSVLEVTQKATPNPSLLAAEDQVPCEKCGSLVPVWDMPEHMDYHFALELQKSFLQPHSSNPQVVSAVSHQGKRNPKSPLACTNKRPRPEGMQTLESFFKPLTH

SEQ ID NO: 148 - protein, 589 aa, Homo sapiens
MKLVHLESLEVCGQMMLRSYVQIFYWHKFVSPVGKLTSPKGMRKQGLFQWLDSLQIDNLTSPDLQLTVGAVIVEEMRAAIERETGFQCSAGISHNKVLAKLACGLNKPNRQTLVSHGSVPQLFSQMPIRKIRSLGGKLGASVIEILGIEYMGELTQFTESQLQSHFGEKNGSWLYAMCRGIEHDPVKPRQLPKTIGCSKNFPGKTALATREQVQWWLLQLAQELEERLTKDRNDNDRVATQLVVSIRVQGDKRLSSLRRCCALTRYDAHKMSHDAFTVIKNCNTSGIQTEWSPPLTMLFLCATKFSASAPSSSTDITSFLSSDPSSLPKVPVTSSEAKTQGSGPAVTATKKATTSLESFFQKAAERQKVKEASLSSLTAPTQAPMSNSPSKPSLPFQTSQSTGTEPFFKQKSLLLKQKQLNNSSVSSPQQNPWSNCKALPNSLPTEYPGCVPVCEGVSKLEESSKATPAEMDLAHNSQSMHASSASKSVLEVTQKATPNPSLLAAEDQVPCEKCGSLVPVWDMPEHMDYHFALELQKSFLQPHSSNPQVVSAVSHQGKRNPKSPLACTNKRPRPEGMQTLESFFKPLTH

SEQ ID NO: 149 - protein, 414 aa, Homo sapiens
MATGQDRVVALVDMDCFFVQVEQRQNPHLRNKPCAVVQYKSWKGGGIIAVSYEARAFGVTRSMWADDAKKLCPDLLLAQVRESRGKANLTKYREASVEVMEIMSRFAVIERASIDEAYVDLTSAVQERLQKLQGQPISADLLPSTYIEGLPQGPTTAEETVQKEGMRKQGLFQWLDSLQIDNLTSPDLQLTVGAVIVEEMRAAIERETGFQCSAGISHNKVLAKLACGLNKPNRQTLVSHGSVPQLFSQMPIRKIRSLGGKLGASVIEILGIEYMGELTQFTESQLQSHFGEKNGSWLYAMCRGIEHDPVKPRQLPKTIGCSKNFPGKTALATREQVQWWLLQLAQELEERLTKDRNDNDRVATQLVVSIRVQGDKRLSSLRRCCALTRYDAHKMSHDAFTVIKNCNTSGIQTE

SEQ ID NO: 150 - protein, 429 aa, Homo sapiens
MRSLGANMAAALRAAGVLLRDPLASSSWRVCQPWRWKSGAAAAAVTTETAQHAQGAKPQVQPQKRYESNIRKPKTGILMLNMGGPETLGDVHDFLLRLFLDRDLMTLPIQNKLAPFIAKRRTPKIQEQYRRIGGGSPIKIWTSKQGEGMVKLLDELSPNTAPHKYYIGFRYVHPLTEEAIEEMERDGLERAIAFTQYPQYSCSTTGSSLNAIYRYYNQVGRKPTMKWSTIDRWPTHHLLIQCFADHILKELDHFPLEKRSEVVILFSAHSLPMSVVNRGDPYPQEVSATVQKVMERLEYCNPYRLVWQSKVGPMPWLGPQTDESIKGLCERGRKNILLVPIAFTSDHIETLYELDIEYSQVLAKECGVENIRRAESLNGNPLFSKALADLVHSHIQSNELCSKQLTLSCPLCVNPVCRETKSFFTSQQL

SEQ ID NO: 151 - protein, 423 aa, Homo sapiens
MRSLGANMAAALRAAGVLLRDPLASSSWRVCQPWRWKSGAAAAAVTTETAQHAQGAKPQVQPQKRKPKTGILMLNMGGPETLGDVHDFLLRLFLDRDLMTLPIQNKLAPFIAKRRTPKIQEQYRRIGGGSPIKIWTSKQGEGMVKLLDELSPNTAPHKYYIGFRYVHPLTEEAIEEMERDGLERAIAFTQYPQYSCSTTGSSLNAIYRYYNQVGRKPTMKWSTIDRWPTHHLLIQCFADHILKELDHFPLEKRSEVVILFSAHSLPMSVVNRGDPYPQEVSATVQKVMERLEYCNPYRLVWQSKVGPMPWLGPQTDESIKGLCERGRKNILLVPIAFTSDHIETLYELDIEYSQVLAKECGVENIRRAESLNGNPLFSKALADLVHSHIQSNELCSKQLTLSCPLCVNPVCRETKSFFTSQQL

SEQ ID NO: 152 - protein, 4061 aa, Homo sapiens
MSTLLENIFAIINLFKQYSKKDKNTDTLSKKELKELLEKEFRQILKNPDDPDMVDVFMDHLDIDHNKKIDFTEFLLMVFKLAQAYYESTRKENLPISGHKHRKHSHHDKHEDNKQEENKENRKRPSSLERRNNRKGNKGRSKSPRETGGKRHESSSEKKERKGYSPTHREEEYGKNHHNSSKKEKNKTENTRLGDNRKRLSERLEEKEDNEEGVYDYENTGRMTQKWIQSGHIATYYTIQDEAYDTTDSLLEENKIYERSRSSDGKSSSQVNRSRHENTSQVPLQESRTRKRRGSRVSQDRDSEGHSEDSERHSGSASRNHHGSAWEQSRDGSRHPRSHDEDRASHGHSADSSRQSGTRHAETSSRGQTASSHEQARSSPGERHGSGHQQSADSSRHSATGRGQASSAVSDRGHRGSSGSQASDSEGHSENSDTQSVSGHGKAGLRQQSHQESTRGRSGERSGRSGSSLYQVSTHEQPDSAHGRTGTSTGGRQGSHHEQARDSSRHSASQEGQDTIRGHPGSSRGGRQGSHHEQSVNRSGHSGSHHSHTTSQGRSDASHGQSGSRSASRQTRNEEQSGDGTRHSGSRHHEASSQADSSRHSQVGQGQSSGPRTSRNQGSSVSQDSDSQGHSEDSERWSGSASRNHHGSAQEQSRDGSRHPRSHHEDRAGHGHSADSSRKSGTRHTQNSSSGQAASSHEQARSSAGERHGSRHQLQSADSSRHSGTGHGQASSAVRDSGHRGSSGSQATDSEGHSEDSDTQSVSGHGQAGHHQQSHQESARDRSGERSRRSGSFLYQVSTHKQSESSHGWTGPSTGVRQGSHHEQARDNSRHSASQDGQDTIRGHPGSSRRGRQGSHHEQSVDRSGHSGSHHSHTTSQGRSDASRGQSGSRSASRTTRNEEQSRDGSRHSGSRHHEASSHADISRHSQAGQGQSEGSRTSRRQGSSVSQDSDSEGHSEDSERWSGSASRNHRGSAQEQSRHGSRHPRSHHEDRAGHGHSADSSRQSGTPHAETSSGGQAASSHEQARSSPGERHGSRHQQSADSSRHSGIPRRQASSAVRDSGHWGSSGSQASDSEGHSEESDTQSVSGHGQDGPHQQSHQESARDWSGGRSGRSGSFIYQVSTHEQSESAHGRTRTSTGRRQGSHHEQARDSSRHSASQEGQDTIRAHPGSRRGGRQGSHHEQSVDRSGHSGSHHSHTTSQGRSDASHGQSGSRSASRQTRKDKQSGDGSRHSGSRHHEAASWADSSRHSQVGQEQSSGSRTSRHQGSSVSQDSDSERHSDDSERLSGSASRNHHGSSREQSRDGSRHPGFHQEDRASHGHSADSSRQSGTHHTESSSHGQAVSSHEQARSSPGERHGSRHQQSADSSRHSGIGHRQASSAVRDSGHRGSSGSQVTNSEGHSEDSDTQSVSAHGQAGPHQQSHKESARGQSGESSGRSRSFLYQVSSHEQSESTHGQTAPSTGGRQGSRHEQARNSSRHSASQDGQDTIRGHPGSSRGGRQGSYHEQSVDRSGHSGYHHSHTTPQGRSDASHGQSGPRSASRQTRNEEQSGDGSRHSGSRHHEPSTRAGSSRHSQVGQGESAGSKTSRRQGSSVSQDRDSEGHSEDSERRSESASRNHYGSAREQSRHGSRNPRSHQEDRASHGHSAESSRQSGTRHAETSSGGQAASSQEQARSSPGERHGSRHQQSADSSTDSGTGRRQDSSVVGDSGNRGSSGSQASDSEGHSEESDTQSVSAHGQAGPHQQSHQESTRGQSGERSGRSGSFLYQVSTHEQSESAHGRTGPSTGGRQRSRHEQARDSSRHSASQEGQDTIRGHPGSSRGGRQGSHYEQSVDSSGHSGSHHSHTTSQERSDVSRGQSGSRSVSRQTRNEKQSGDGSRHSGSRHHEASSRADSSRHSQVGQGQSSGPRTSRNQGSSVSQDSDSQGHSEDSERWSGSASRNHLGSAWEQSRDGSRHPGSHHEDRAGHGHSADSSRQSGTRHTESSSRGQAASSHEQARSSAGERHGSHHQLQSADSSRHSGIGHGQASSAVRDSGHRGYSGSQASDSEGHSEDSDTQSVSAQGKAGPHQQSHKESARGQSGESSGRSGSFLYQVSTHEQSESTHGQSAPSTGGRQGSHYDQAQDSSRHSASQEGQDTIRGHPGPSRGGRQGSHQEQSVDRSGHSGSHHSHTTSQGRSDASRGQSGSRSASRKTYDKEQSGDGSRHSGSHHHEASSWADSSRHSLVGQGQSSGPRTSRPRGSSVSQDSDSEGHSEDSERRSGSASRNHHGSAQEQSRDGSRHPRSHHEDRAGHGHSAESSRQSGTHHAENSSGGQAASSHEQARSSAGERHGSHHQQSADSSRHSGIGHGQASSAVRDSGHRGSSGSQASDSEGHSEDSDTQSVSAHGQAGPHQQSHQESTRGRSAGRSGRSGSFLYQVSTHEQSESAHGRTGTSTGGRQGSHHKQARDSSRHSTSQEGQDTIHGHPGSSSGGRQGSHYEQLVDRSGHSGSHHSHTTSQGRSDASHGHSGSRSASRQTRNDEQSGDGSRHSGSRHHEASSRADSSGHSQVGQGQSEGPRTSRNWGSSFSQDSDSQGHSEDSERWSGSASRNHHGSAQEQLRDGSRHPRSHQEDRAGHGHSADSSRQSGTRHTQTSSGGQAASSHEQARSSAGERHGSHHQQSADSSRHSGIGHGQASSAVRDSGHRGYSGSQASDNEGHSEDSDTQSVSAHGQAGSHQQSHQESARGRSGETSGHSGSFLYQVSTHEQSESSHGWTGPSTRGRQGSRHEQAQDSSRHSASQDGQDTIRGHPGSSRGGRQGYHHEHSVDSSGHSGSHHSHTTSQGRSDASRGQSGSRSASRTTRNEEQSGDGSRHSGSRHHEASTHADISRHSQAVQGQSEGSRRSRRQGSSVSQDSDSEGHSEDSERWSGSASRNHHGSAQEQLRDGSRHPRSHQEDRAGHGHSADSSRQSGTRHTQTSSGGQAASSHEQARSSAGERHGSHHQQSADSSRHSGIGHGQASSAVRDSGHRGYSGSQASDNEGHSEDSDTQSVSAHGQAGSHQQSHQESARGRSGETSGHSGSFLYQVSTHEQSESSHGWTGPSTRGRQGSRHEQAQDSSRHSASQYGQDTIRGHPGSSRGGRQGYHHEHSVDSSGHSGSHHSHTTSQGRSDASRGQSGSRSASRTTRNEEQSGDSSRHSVSRHHEASTHADISRHSQAVQGQSEGSRRSRRQGSSVSQDSDSEGHSEDSERWSGSASRNHRGSVQEQSRHGSRHPRSHHEDRAGHGHSADRSRQSGTRHAETSSGGQAASSHEQARSSPGERHGSRHQQSADSSRHSGIPRGQASSAVRDSRHWGSSGSQASDSEGHSEESDTQSVSGHGQAGPHQQSHQESARDRSGGRSGRSGSFLYQVSTHEQSESAHGRTRTSTGRRQGSHHEQARDSSRHSASQEGQDTIRGHPGSSRRGRQGSHYEQSVDRSGHSGSHHSHTTSQGRSDASRGQSGSRSASRQTRNDEQSGDGSRHSWSHHHEASTQADSSRHSQSGQGQSAGPRTSRNQGSSVSQDSDSQGHSEDSERWSGSASRNHRGSAQEQSRDGSRHPTSHHEDRAGHGHSAESSRQSGTHHAENSSGGQAASSHEQARSSAGERHGSHHQQSADSSRHSGIGHGQASSAVRDSGHRGSSGSQASDSEGHSEDSDTQSVSAHGQAGPHQQSHQESTRGRSAGRSGRSGSFLYQVSTHEQSESAHGRAGPSTGGRQGSRHEQARDSSRHSASQEGQDTIRGHPGSRRGGRQGSYHEQSVDRSGHSGSHHSHTTSQGRSDASHGQSGSRSASRETRNEEQSGDGSRHSGSRHHEASTQADSSRHSQSGQGESAGSRRSRRQGSSVSQDSDSEAYPEDSERRSESASRNHHGSSREQSRDGSRHPGSSHRDTASHVQSSPVQSDSSTAKEHGHFSSLSQDSAYHSGIQSRGSPHSSSSYHYQSEGTERQKGQSGLVWRHGSYGSADYDYGESGFRHSQHGSVSYNSNPVVFKERSDICKASAFGKDHPRYYATYINKDPGLCGHSSDISKQLGFSQSQRYYYYE

SEQ ID NO: 153 - protein, 578 aa, Homo sapiens
MRQQDAPKPTPAACRCSGLARRVLTIAFALLILGLMTWAYAAGVPLASDRYGLLAFGLYGAFLSAHLVAQSLFAYLEHRRVAAAARGPLDAATARSVALTISAYQEDPAYLRQCLASARALLYPRARLRVLMVVDGNRAEDLYMVDMFREVFADEDPATYVWDGNYHQPWEPAAAGAVGAGAYREVEAEDPGRLAVEALVRTRRCVCVAQRWGGKREVMYTAFKALGDSVDYVQVCDSDTRLDPMALLELVRVLDEDPRVGAVGGDVRILNPLDSWVSFLSSLRYWVAFNVERACQSYFHCVSCISGPLGLYRNNLLQQFLEAWYNQKFLGTHCTFGDDRHLTNRMLSMGYATKYTSRSRCYSETPSSFLRWLSQQTRWSKSYFREWLYNALWWHRHHAWMTYEAVVSGLFPFFVAATVLRLFYAGRPWALLWVLLCVQGVALAKAAFAAWLRGCLRMVLLSLYAPLYMCGLLPAKFLALVTMNQSGWGTSGRRKLAANYVPLLPLALWALLLLGGLVRSVAHEARADWSGPSRAAEAYHLAAGAGAYVGYWVAMLTLYWVGVRRLCRRRTGGYRVQV

SEQ ID NO: 154 - protein, 577 aa, Homo sapiens
MRQDAPKPTPAACRCSGLARRVLTIAFALLILGLMTWAYAAGVPLASDRYGLLAFGLYGAFLSAHLVAQSLFAYLEHRRVAAAARGPLDAATARSVALTISAYQEDPAYLRQCLASARALLYPRARLRVLMVVDGNRAEDLYMVDMFREVFADEDPATYVWDGNYHQPWEPAAAGAVGAGAYREVEAEDPGRLAVEALVRTRRCVCVAQRWGGKREVMYTAFKALGDSVDYVQVCDSDTRLDPMALLELVRVLDEDPRVGAVGGDVRILNPLDSWVSFLSSLRYWVAFNVERACQSYFHCVSCISGPLGLYRNNLLQQFLEAWYNQKFLGTHCTFGDDRHLTNRMLSMGYATKYTSRSRCYSETPSSFLRWLSQQTRWSKSYFREWLYNALWWHRHHAWMTYEAVVSGLFPFFVAATVLRLFYAGRPWALLWVLLCVQGVALAKAAFAAWLRGCLRMVLLSLYAPLYMCGLLPAKFLALVTMNQSGWGTSGRRKLAANYVPLLPLALWALLLLGGLVRSVAHEARADWSGPSRAAEAYHLAAGAGAYVGYWVAMLTLYWVGVRRLCRRRTGGYRVQV

SEQ ID NO: 155 - protein, 552 aa, Homo sapiens
MHCERFLCILRIIGTTLFGVSLLLGITAAYIVGYQFIQTDNYYFSFGLYGAFLASHLIIQSLFAFLEHRKMKKSLETPIKLNKTVALCIAAYQEDPDYLRKCLQSVKRLTYPGIKVVMVIDGNSEDDLYMMDIFSEVMGRDKSATYIWKNNFHEKGPGETDESHKESSQHVTQLVLSNKSICIMQKWGGKREVMYTAFRALGRSVDYVQVCDSDTMLDPASSVEMVKVLEEDPMVGGVGGDVQILNKYDSWISFLSSVRYWMAFNIERACQSYFGCVQCISGPLGMYRNSLLHEFVEDWYNQEFMGNQCSFGDDRHLTNRVLSLGYATKYTARSKCLTETPIEYLRWLNQQTRWSKSYFREWLYNAMWFHKHHLWMTYEAIITGFFPFFLIATVIQLFYRGKIWNILLFLLTVQLVGLIKSSFASCLRGNIVMVFMSLYSVLYMSSLLPAKMFAIATINKAGWGTSGRKTIVVNFIGLIPVSVWFTILLGGVIFTIYKESKRPFSESKQTVLIVGTLLYACYWVMLLTLYVVLINKCGRRKKGQQYDMVLDV

SEQ ID NO: 156 - protein, 553 aa, Homo sapiens
MPVQLTTALRVVGTSLFALAVLGGILAAYVTGYQFIHTEKHYLSFGLYGAILGLHLLIQSLFAFLEHRRMRRAGQALKLPSPRRGSVALCIAAYQEDPDYLRKCLRSAQRISFPDLKVVMVVDGNRQEDAYMLDIFHEVLGGTEQAGFFVWRSNFHEAGEGETEASLQEGMDRVRDVVRASTFSCIMQKWGGKREVMYTAFKALGDSVDYIQVCDSDTVLDPACTIEMLRVLEEDPQVGGVGGDVQILNKYDSWISFLSSVRYWMAFNVERACQSYFGCVQCISGPLGMYRNSLLQQFLEDWYHQKFLGSKCSFGDDRHLTNRVLSLGYRTKYTARSKCLTETPTKYLRWLNQQTRWSKSYFREWLYNSLWFHKHHLWMTYESVVTGFFPFFLIATVIQLFYRGRIWNILLFLLTVQLVGIIKATYACFLRGNAEMIFMSLYSLLYMSSLLPAKIFAIATINKSGWGTSGRKTIVVNFIGLIPVSIWVAVLLGGLAYTAYCQDLFSETELAFLVSGAILYGCYWVALLMLYLAIIARRCGKKPEQYSLAFAEV

SEQ ID NO: 157 - protein, 281 aa, Homo sapiens
MPVQLTTALRVVGTSLFALAVLGGILAAYVTGYQFIHTEKHYLSFGLYGAILGLHLLIQSLFAFLEHRRMRRAGQALKLPSPRRGSVALCIAAYQEDPDYLRKCLRSAQRISFPDLKVVMVVDGNRQEDAYMLDIFHEVLGGTEQAGFFVWRSNFHEAGEGETEASLQEGMDRVRDVVRASTFSCIMQKWGGKREVMYTAFKALGDSVDYIQVCDSDTVLDPACTIEMLRVLEEDPQVGGVGGDVQPPGKGMAVEDDQVQAAQVRATEAWSVHQRHVSREQ

SEQ ID NO: 158 - protein, 267 aa, Homo sapiens
MPRSCCSRSGALLLALLLQASMEVRGWCLESSQCQDLTTESNLLECIRACKPDLSAETPMFPGNGDEQPLTENPRKYVMGHFRWDRFGRRNSSSSGSSGAGQKREDVSAGEDCGPLPEGGPEPRSDGAKPGPREGKRSYSMEHFRWGKPVGKKRRPVKVYPNGAEDESAEAFPLEFKRELTGQRLREGDGPDGPADDGAGAQADLEHSLLVAAEKKDEGPYRMEHFRWGSPPKDKRYGGFMTSEKSQTPLVTLFKNAIIKNAYKKGE

SEQ ID NO: 159 - protein, 726 aa, Homo sapiens
MNHSPLKTALAYECFQDQDNSTLALPSDQKMKTGTSGRQRVQEQVMMTVKRQKSKSSQSSTLSHSNRGSMYDGLADNYNYGTTSRSSYYSKFQAGNGSWGYPIYNGTLKREPDNRRFSSYSQMENWSRHYPRGSCNTTGAGSDICFMQKIKASRSEPDLYCDPRGTLRKGTLGSKGQKTTQNRYSFYSTCSGQKAIKKCPVRPPSCASKQDPVYIPPISCNKDLSFGHSRASSKICSEDIECSGLTIPKAVQYLSSQDEKYQAIGAYYIQHTCFQDESAKQQVYQLGGICKLVDLLRSPNQNVQQAAAGALRNLVFRSTTNKLETRRQNGIREAVSLLRRTGNAEIQKQLTGLLWNLSSTDELKEELIADALPVLADRVIIPFSGWCDGNSNMSREVVDPEVFFNATGCLRNLSSADAGRQTMRNYSGLIDSLMAYVQNCVAASRCDDKSVENCMCVLHNLSYRLDAEVPTRYRQLEYNARNAYTEKSSTGCFSNKSDKMMNNNYDCPLPEEETNPKGSGWLYHSDAIRTYLNLMGKSKKDATLEACAGALQNLTASKGLMSSGMSQLIGLKEKGLPQIARLLQSGNSDVVRSGASLLSNMSRHPLLHRVMGNQVFPEVTRLLTSHTGNTSNSEDILSSACYTVRNLMASQPQLAKQYFSSSMLNNIINLCRSSASPKAAEAARLLLSDMWSSKELQGVLRQQGFDRNMLGTLAGANSLRNFTSRF

SEQ ID NO: 160 - protein, 747 aa, Homo sapiens
MNHSPLKTALAYECFQDQDNSTLALPSDQKMKTGTSGRQRVQEQVMMTVKRQKSKSSQSSTLSHSNRGSMYDGLADNYNYGTTSRSSYYSKFQAGNGSWGYPIYNGTLKREPDNRRFSSYSQMENWSRHYPRGSCNTTGAGSDICFMQKIKASRSEPDLYCDPRGTLRKGTLGSKGQKTTQNRYSFYSTCSGQKAIKKCPVRPPSCASKQDPVYIPPISCNKDLSFGHSRASSKICSEDIECSGLTIPKAVQYLSSQDEKYQAIGAYYIQHTCFQDESAKQQVYQLGGICKLVDLLRSPNQNVQQAAAGALRNLVFRSTTNKLETRRQNGIREAVSLLRRTGNAEIQKQLTGLLWNLSSTDELKEELIADALPVLADRVIIPFSGWCDGNSNMSREVVDPEVFFNATGCLRKRLGMRELLALVPQRATSSRVNLSSADAGRQTMRNYSGLIDSLMAYVQNCVAASRCDDKSVENCMCVLHNLSYRLDAEVPTRYRQLEYNARNAYTEKSSTGCFSNKSDKMMNNNYDCPLPEEETNPKGSGWLYHSDAIRTYLNLMGKSKKDATLEACAGALQNLTASKGLMSSGMSQLIGLKEKGLPQIARLLQSGNSDVVRSGASLLSNMSRHPLLHRVMGNQVFPEVTRLLTSHTGNTSNSEDILSSACYTVRNLMASQPQLAKQYFSSSMLNNIINLCRSSASPKAAEAARLLLSDMWSSKELQGVLRQQGFDRNMLGTLAGANSLRNFTSRF

SEQ ID NO: 161 - protein, 341 aa, Homo sapiens
MNIVVEFFVVTFKVLWAFVLAAARWLVRPKEKSVAGQVCLITGAGSGLGRLFALEFARRRALLVLWDINTQSNEETAGMVRHIYRDLEAADAAALQAGNGEEEILPHCNLQVFTYTCDVGKRENVYLTAERVRKEVGEVSVLVNNAGVVSGHHLLECPDELIERTMMVNCHAHFWTTKAFLPTMLEINHGHIVTVASSLGLFSTAGVEDYCASKFGVVGFHESLSHELKAAEKDGIKTTLVCPYLVDTGMFRGCRIRKEIEPFLPPLKPDYCVKQAMKAILTDQPMICTPRLMYIVTFMKSILPFEAVVCMYRFLGADKCMYPFIAQRKQATNNNEAKNGI

SEQ ID NO: 162 - protein, 307 aa, Homo sapiens
MGGLTASDVHPTLGVQLFSAGIAACLADVITFPLDTAKVRLQVQGECPTSSVIRYKGVLGTITAVVKTEGRMKLYSGLPAGLQRQISSASLRIGLYDTVQEFLTAGKETAPSLGSKILAGLTTGGVAVFIGQPTEVVKVRLQAQSHLHGIKPRYTGTYNAYRIIATTEGLTGLWKGTTPNLMRSVIINCTELVTYDLMKEAFVKNNILADDVPCHLVSALIAGFCATAMSSPVDVVKTRFINSPPGQYKSVPNCAMKVFTNEGPTAFFKGLVPSFLRLGSWNVIMFVCFEQLKRELSKSRQTMDCAT

SEQ ID NO: 163 - protein, 529 aa, Homo sapiens [sequence omitted]
